(19) United States
(12) Patent Application Publication
(10) Pub. No.: US 2012/0156737 A1
(43) Pub. Date: Jun. 21, 2012

(54) PREPARATION OF ALPHA-KETOPIMELIC ACID

(75) Inventors: Petronella Catharina Raemakers-Franken, KJ Budel (NL); Martin Schurmann, Julich (DE); Axel Christoph Trefzer, Leidschendam (DE); Stefaan Marie Andre De Wildeman, Maasmechelen (BE)

(73) Assignee: DSM IP ASSETS B.V., TE Heerlen (NL)

(21) Appl. No.: 13/255,161

(22) PCT Filed: Mar. 11, 2010
(86) PCT No.: PCT/NL2010/050126

§ 371 Date: Jan. 6, 2012

(30) Foreign Application Priority Data
Mar. 11, 2009 (EP) 09154840.4
Sep. 11, 2009 (EP) 09170092.2
Dec. 22, 2009 (EP) 09180441.9

(51) Int. Cl. C12P 7/50; C12P 13/00; C12P 17/10; C12N 1/19; C12N 1/21; C12P 7/40; C12N 1/15

(52) U.S. Cl. 435/121; 435/143; 435/136; 435/128; 435/254.5; 435/254.3; 435/254.11; 435/254.21; 435/254.2; 435/254.23; 435/252.33; 435/252.3; 435/252.34

(57) ABSTRACT

The invention relates to a method for preparing alpha-ketopimelic acid, comprising converting alpha-ketoglutaric acid into alpha-ketoadipic acid and converting alpha-ketoadipic acid into alpha-ketopimelic acid, wherein at least one of these conversions is carried out using a heterologous biocatalyst. The invention further relates to a heterologous cell, comprising one or more heterologous nucleic acid sequences encoding one or more heterologous enzymes capable of catalysing at least one reaction step in the preparation of alpha-ketopimelic acid from alpha-ketoglutaric acid.

[0001] The invention relates to a method for preparing alpha-ketopimelic acid (hereinafter also referred to as ‘AKP’; AKP is also known as 2-oxo-heptanedioic acid). The invention further relates to a method for preparing 5-formylpentanoic acid (hereinafter also referred to as ‘5-EVA’) and to a method for preparing 6-aminocaproic acid (hereinafter also referred to as ‘6-ACA’). The invention also relates to a method for preparing diaminohexane (also known as 1,6-hexanediamine). The invention further relates to a heterologous cell which may be used in a method according to the invention. The invention further relates to the use of a heterologous cell in the preparation of ε-caprolactam (hereafter referred to as ‘caprolactam’), 6-aminocaproic acid or diaminohexane.

[0002] Diaminohexane is inter alia used for the production of polyamides such as nylon 6,6. Other uses include uses as starting material for other building blocks (e.g. hexamethylene diisocyanate) and as crosslinking agent for epoxides. A Known preparation method proceeds from acrylonitrile via adiponitrile.

[0003] Caprolactam is a lactam which may be used for the production of polyamide, for instance nylon-6 or nylon-6,12 (a copolymer of caprolactam and laurolactam). Various manners of preparing caprolactam from bulk chemicals are known in the art and include the preparation of caprolactam from cyclohexanone, toluene, phenol, cyclohexanol, benzene or cyclohexane. These intermediate compounds are generally obtained from mineral oil. In view of a growing desire to prepare materials using more sustainable technology it would be desirable to provide a method wherein caprolactam is prepared from an intermediate compound that can be obtained from a biologically renewable source or at least from an intermediate compound that is converted into caprolactam using a biochemical method. Further, it would be desirable to provide a method that requires less energy than conventional chemical processes making use of bulk chemicals from petrochemical origin.

[0004] It is known to prepare caprolactam from 6-ACA, e.g. as described in U.S. Pat. No. 6,194,572. As disclosed in WO 2005/068643, 6-ACA may be prepared biochemically by converting 6-aminohex-2-enoic acid (6-AHEA) in the presence of an enzyme having α,β-enoate reductase activity. The 6-AHEA may be prepared from lysine, e.g. biochemically or by pure chemical synthesis. Although the preparation of 6-ACA via the reduction of 6-AHEA is feasible by the methods disclosed in WO 2005/068643, the inventors have found that—under the reduction reaction conditions—6-AHEA may spontaneously and substantially irreversibly cyclise to form an undesired side-product, notably β-homoproline. This cyclisation may be a bottleneck in the production of 6-ACA, and may lead to a considerable loss in yield.

[0005] The inventors have realised that it is possible to prepare 6-ACA from AKP. AKP can be prepared chemically, e.g. based on a method as described by H. Jäger et al. Chem. Ber. 1959, 92, 2492-2499. AKP can be prepared by alkylating cyclopentanone with diethyl oxalate using sodium ethoxide as a base, refluxing the resultant product in a strong acid (2 M HCl) and recovering the product, e.g. by crystallisation from toluene. However, as indicated above, there is a growing desire to prepare materials using more sustainable technology. Thus, the inventors realised it would be desirable to provide a method wherein AKP is prepared from an intermediate compound that can be obtained from a biologically renewable source.

[0006] It is an object of the invention to provide a novel method for preparing AKP, which may be used, in particular, for the preparation of 6-ACA, diaminohexane or another compound.

[0007] It is further an object to provide a novel biocatalyst, suitable for catalysing one or more reaction step in a method for preparing AKP.

[0008] One or more further objects which may be solved in accordance with the invention will follow from the description below.

[0009] The inventors have realised it is possible to prepare AKP using a specific biocatalyst.

[0010] Accordingly, the present invention relates to a method for preparing AKP, comprising converting alpha-ketoglutaric acid (AKG) into alpha-ketoadipic acid (AKA) and converting alpha-ketoadipic acid into alpha-ketopimelic acid, wherein at least one of these conversions is carried out using a biocatalyst, in particular a heterologous biocatalyst.

[0011] The AKP may for instance be used as an intermediate in the preparation of 5-formylpentanoic acid (5-FVA).

[0012] Accordingly, the invention further relates to a method for preparing 5-FVA comprising biocatalytically decarboxylating AKP prepared in a method according to the invention thereby forming 5-FVA.

[0013] The 5-FVA is for instance a suitable intermediate compound for preparing 6-ACA, caprolactam or diaminohexane.

[0014] The AKP may for instance be used as an intermediate in the preparation of alpha amino-pimelic acid (AAP).

[0015] Accordingly, the invention further relates to a method for preparing AAP comprising biocatalytically transaminating AKP prepared in a method according to the invention, thereby forming AAP.

[0016] The AAP is for instance a suitable intermediate compound for preparing 6-ACA, or caprolactam.

[0017] 6-ACA may for instance be converted into caprolactam or into diaminohexane.

[0018] The invention further provides a heterologous cell, comprising one or more heterologous nucleic acid sequences encoding one or more heterologous enzymes capable of catalysing at least one reaction step in the preparation of alpha-ketopimelic acid from alpha-ketoglutaric acid.

[0019] Such cell may in particular be used as a biocatalyst in a method for preparing at least one compound selected from the group of AKP, 5-FVA, 6-ACA, diaminohexane and caprolactam.

[0020] In accordance with the invention, no problems have been noticed with respect to an undesired cyclisation of an intermediate product, when forming 6-ACA and optionally caprolactam, resulting in a loss of yield.

[0021] It is envisaged that a method of the invention allows a comparable or even better yield than the method described in WO 2005/68643. It is envisaged that a method of the invention may in particular be favourable if use is made of a living organism—in particular in a method wherein growth and maintenance of the organism is taken into account.

[0022] It is further envisaged that in an embodiment of the invention the productivity of 6-ACA (g/l.h formed) in a method of the invention may be improved.

[0023] The term “or” as used herein is defined as “and/or” unless specified otherwise.

[0024] The term “a” or “an” as used herein is defined as “at least one” unless specified otherwise.

[0025] When referring to a noun (e.g. a compound, an additive, etc.) in the singular, the plural is meant to be included. Thus, when referring to a specific moiety, e.g. “compound”, this means “at least one” of that moiety, e.g. “at least one compound”, unless specified otherwise.

[0026] When referred herein to carboxylic acids or carboxylates, e.g. 6-ACA, another amino acid, 5-FVA, succinic acid/succinate, acetic acid/acetate, these terms are meant to include the protonated carboxylic acid (free acid), the corresponding carboxylate (its conjugated base) as well as a salt thereof, unless specified otherwise. Likewise, when referring to an amine, this is meant to include the protonated amine (typically cationic, e.g. R—NH₃⁺) and the unprotonated amine (typically uncharged, e.g. R—NH₂). When referring herein to amino acids, e.g. 6-ACA, this term is meant to include amino acids in their zwitterionic form (in which the amino group is in the protonated and the carboxylate group is in the deprotonated form), the amino acid in which the amino group is protonated and the carboxylic group is in its neutral form, and the amino acid in which the amino group is in its neutral form and the carboxylate group is in the deprotonated form, as well as salts thereof.

[0027] When referring to a compound of which several isomers exist (e.g. a cis and a trans isomer, an R and an S enantiomer), the compound in principle includes all enantiomers, diastereomers and cis/trans isomers of that compound that may be used in the particular method of the invention.

[0028] When an enzyme is mentioned with reference to an enzyme class (EC) between brackets, the enzyme class is a class wherein the enzyme is classified or may be classified, on the basis of the Enzyme Nomenclature provided by the Nomenclature Committee of the International Union of Biochemistry and Molecular Biology (NC-IUBMB), which nomenclature may be found at http://www.chem.qmul.ac.uk/iubmb/enzyme/. Other suitable enzymes that have not (yet) been classified in a specified class but may be classified as such, are meant to be included.

[0029] If referred herein to a protein or gene by reference to a accession number, this number in particular is used to refer to a protein or gene having a sequence as found in Uniprot on 11 Mar. 2008, unless specified otherwise.

[0030] As used herein, the term “functional analogue” of a nucleic acid at least includes other sequences encoding an enzyme having the same amino acid sequence and other sequences encoding a homologue of such enzyme.

[0031] The term “homologue” is used herein in particular for polynucleotides or polypeptides having a sequence identity of at least 30%, preferably at least 40%, more preferably at least 60%, more preferably at least 65%, more preferably at least 70%, more preferably at least 75%, more preferably at least 80%, in particular at least 85%, more in particular at least 90%, at least 91%, at least 92%, at least 93%, at least 94%, at least 95%, at least 96%, at least 97%, at least 98% or at least 99%. The term homologue is also meant to include nucleic acid sequences (polynucleotide sequences) which differ from another nucleic acid sequence due to the degeneracy of the genetic code and encode the same polypeptide sequence.

[0032] Sequence identity or similarity is herein defined as a relationship between two or more polypeptide sequences or two or more nucleic acid sequences, as determined by comparing the sequences. Usually, sequence identities or similarities are compared over the whole length of the sequences, but may however also be compared only for a part of the sequences aligning with each other. In the art, “identity” or “similarity” also means the degree of sequence relatedness between polypeptide sequences or nucleic acid sequences, as the case may be, as determined by the match between such sequences. Preferred methods to determine identity or similarity are designed to give the largest match between the sequences tested. In context of this invention a preferred computer program method to determine identity and similarity between two sequences includes BLASTP and BLASTN (Altschul, S. F. et al., J. Mol. Biol. 1990, 215, 403-410, publicly available from NCBI and other sources (BLAST Manual, Altschul, S., et al., NCBI NLM NIH Bethesda, Md. 20894). Preferred parameters for polypeptide sequence comparison using BLASTP are gap open 10.0, gap extend 0.5, Blosum 62 matrix. Preferred parameters for nucleic acid sequence comparison using BLASTN are gap open 10.0, gap extend 0.5, DNA full matrix (DNA identity matrix).

[0033] A heterologous biocatalyst, in particular a heterologous cell, as used herein, is a biocatalyst comprising a heterologous protein or a heterologous nucleic acid (usually as part of the cell's DNA or RNA) The term “heterologous” when used with respect to a nucleic acid sequence (DNA or RNA), or a protein refers to a nucleic acid or protein that does not occur naturally as part of the organism, cell, genome or DNA or RNA sequence in which it is present, or that is found in a cell or location or locations in the genome or DNA or RNA sequence that differ from that in which it is found in nature. It is understood that heterologous DNA in a heterologous organism is part of the genome of that heterologous organism. Heterologous nucleic acids or proteins are not endogenous to the cell into which they are introduced, but have been obtained from another cell or synthetically or recombinantly produced. Generally, though not necessarily, such nucleic acids encode proteins that are not normally produced by the cell in which the DNA is transcribed or expressed. Similarly heterologous RNA encodes for proteins not normally expressed in the cell in which the heterologous RNA is present. Heterologous nucleic acids and proteins may also be referred to as foreign nucleic acids or proteins. Any nucleic acid or protein that one of skill in the art would recognise as heterologous or foreign to the cell in which it is expressed is herein encompassed by the term heterologous nucleic acid or protein.

[0034] When referred to an enzyme or another biocatalytic moiety from a particular source, recombinant enzymes or other recombinant biocatalytic moieties, originating from a first organism, but actually produced in a (genetically modified) second organism, are specifically meant to be included as enzymes or other biocatalytic moieties, from that first organism.

[0035] In a method of the invention, a biocatalyst is used, i.e. at least one reaction step in the method is catalysed by a biological material or moiety derived from a biological source, for instance an organism or a biomolecule derived there from. The biocatalyst may in particular comprise one or more enzymes. A biocatalytic reaction may comprise one or more chemical conversions of which at least one is catalyzed by a biocatalyst. Thus the ‘biocatalyst’ may accelerate a chemical reaction in at least one reaction step in the preparation of AKP from AKG, at least one reaction step in the preparation of 5-FVA or AAP from AKP, at least one reaction step in the preparation of 6-ACA from 5-FVA, at least one reaction step in the preparation of 6-ACA from AAP or at least one reaction step in the preparation of caprolactam from 6-ACA.

[0036] The biocatalyst may be used in any form. In an embodiment, one or more enzymes form part of a living organism (such as living whole cells). The enzymes may perform a catalytic function inside the cell. It is also possible that the enzyme may be secreted into a medium, wherein the cells are present. In an embodiment, one or more enzymes are used isolated from the natural environment (isolated from the organism it has been produced in), for instance as a solution, an emulsion, a dispersion, (a suspension of) freeze-dried cells, a lysate, or immobilised on a support. The use of an enzyme isolated from the organism it originates from may in particular be useful in view of an increased flexibility in adjusting the reaction conditions such that the reaction equilibrium is shifted to the desired side.

[0037] Living cells may be growing cells, resting or dormant cells (e.g. spores) or cells in a stationary phase. It is also possible to use an enzyme forming part of a permeabilized cell (i.e. made permeable to a substrate for the enzyme or a precursor for a substrate for the enzyme or enzymes).

[0038] The biocatalyst (used in a method of the invention) may in principle be any organism, or be obtained or derived from any organism. This organism may be a naturally occurring organism or a heterologous organism. The heterologous organism is typically a host cell which comprises at least one nucleic acid sequence encoding a heterologous enzyme, capable of catalysing at least one reaction step in a method of the invention. The organism from which the heterologous nucleic acid sequence originates may be eukaryotic or prokaryotic. In particular said organisms may be independently selected from animals (including humans), plants, bacteria, archaea, yeasts and fungi.

[0039] The host cell may be eukaryotic or prokaryotic. In an embodiment, the host cell is selected from the group of fungi, yeasts, euglenoids, archaea and bacteria. The host cell may in particular be selected from the group of genera consisting of Aspergillus, Penicillium, Ustilago, Cephalosporium, Trichophytum, Paecilomyces, Pichia, Hansenula, Saccharomyces, Candida, Kluyveromyces, Yarrowia, Bacillus, Corynebacterium, Escherichia, Azotobacter, Frankia, Rhizobium, Bradyrhizobium, Anabaena, Synechocystis, Microcystis, Klebsiella, Rhodobacter, Pseudomonas, Thermus, Deinococcus Gluconobacter, Methanosphaera, Methanobrevibacter, Methanospirillum, Methanococcus, Methanobacterium, Methanocaldococcus and Methanosarcina. In particular, the host strain and, thus, host cell for use in a method of the invention may be selected from the group of Escherichia coli, Azotobacter vinelandii, Klebsiella pneumoniae, Anabaena sp., Synechocystis sp., Microcystis aeruginosa, Deinococcus radiourans, Deinococcus geothermalis, Thermus thermophilus, Bacillus subtilis, Bacillus amyloliquefaciens, Bacillus methanolicus, Corynebacterium glutamicum, Aspergillus niger, Penicillium chrysogenum, Penicillium notatum, Paecilomyces carneus, Cephalosporium acremonium, Ustilago maydis, Pichia pastoris, Saccharomyces cerevisiae, Kluyveromyces lactis, Candida maltosa, Yarrowia lipolytica, Hansenula polymorpha, Sulfolobus solfataricus, Methanobacterium thermoautothrophicum, Methanococcus maripaludis, Methanocaldococcus jannashii, Methanosphaera stadtmanae, Methanococcus voltae, Methanosarcina acetivorans, Methanosarcina barkeri, Methanosarcina acetivorans, Methanospirillum hungatei, Methanosaeta thermophila, Methanobrevibacter smithii, Methanococcus vannielii, Methanococcus aeolicus and Methanosarcina mazei host cells

[0040] In particular in an embodiment wherein AKP is to be converted into a further product, for instance 5-FVA, AAP, diaminohexane or 6-ACA, it is considered advantageous that the host cell is an organism naturally capable of converting AKP to such product or at least capable of catalysing at least one of the necessary reactions. For instance, Escherichia coli has aminotransferase activity, whereby E. coli may catalyse the formation of AAP from AKP (see also below) or the conversion of 5-FVA (which may be formed in the cell if the cell also contains a suitable decarboxylase, see also below) to 6-ACA.

[0041] Advantageously, the host cell is an organism comprising a biocatalyst catalysing the amino adipate pathway for lysine biosynthesis (also termed AAA pathway) or a part thereof (such as lower eukaryotes: fungi, yeasts, euglenoids; certain bacteria, e.g. Thermus, Deinococcus; Archaea) or comprising a biocatalyst for nitrogen fixation via a nitrogenase.

[0042] In a preferred embodiment, the host cell is an organism with a high flux through the AAA pathway, such as Penicillium chrysogenum, Ustilago maydis or an organism adapted, preferably optimised, for lysine production. A high flux is defined as at least 20%, more preferred at least 50%, even more preferred at least 70%, most preferred at least 100% of the rate required to supply lysine for biosynthesis of cellular protein in the respective organism under the chosen production conditions.

[0043] In a preferred embodiment, the host cell is an organism with high levels of homocitrate being produced, which may be a naturally occurring or a heterologous organism. Such an organism may be obtained by expressing a homocitrate synthase required for formation of the essential cofactor found in nitrogenases or a homologue thereof.

[0044] In an embodiment, the host cell comprises a heterologous nucleic acid sequence originating from an animal, in particular from a part thereof—e.g. liver, pancreas, brain, kidney, heart or other organ. The animal may in particular be selected from the group of mammals, more in particular selected from the group of Leporidae, Muridae, Suidae and Bovidae.

[0045] In an embodiment, the host cell comprises a heterologous nucleic acid sequence originating from a plant. Suitable plants in particular include plants selected from the group of Asplenium; Cucurbitaceae, in particular Curcurbita, e.g. Curcurbita moschata (squash), or Cucumis; Brassicaceae, in particular Arabidopsis, e.g. A. thaliana; Mercurialis, e.g. Mercurialis perennis; Hydnocarpus; and Ceratonia.

[0046] In an embodiment, the host cell comprises a heterologous nucleic acid sequence originating from a bacterium. Suitable bacteria may in particular be selected amongst the group of Vibrio, Pseudomonas, Bacillus, Corynebacterium, Brevibacterium, Enterococcus, Streptococcus, Actinomycetales, Klebsiella, Lactococcus, Lactobacillus, Clostridium, Escherichia, Klebsiella, Anabaena, Microcystis, Synechocystis, Rhizobium, Bradyrhizobium, Thermus, Mycobacterium, Zymomonas, Proteus, Agrobacterium, Geobacillus, Acinetobacter, Azotobacter, Ralstonia, Rhodobacter, Paracoccus, Novosphingobium, Nitrosomonas, Legionella, Neisseria, Rhodopseudomonas, Staphylococcus, Deinococcus and Salmonella.

[0047] In an embodiment, the host cell comprises a heterologous nucleic acid sequence originating from an archaea. Suitable archaea may in particular be selected amongst the group of Archaeoglobus, Aeropyrum, Halobacterium, Methanosarcina, Methanococcus, Thermoplasma, Thermococcus, Pyrobaculum, Methanospirillum, Pyrococcus, Sulfolobus, Methanococcus, Methanosphaera, Methanopyrus, Methanobrevibacter, Methanocaldococcus and Methanobacterium.

[0048] In an embodiment, the host cell comprises a heterologous nucleic acid sequence originating from a fungus. Suitable fungi may in particular be selected amongst the group of Rhizopus, Phanerochaete, Emericella, Ustilago, Neurospora, Penicillium, Cephalosporium, Paecilomyces, Trichophytum and Aspergillus.

[0049] In an embodiment, the host cell comprises a heterologous nucleic acid sequence originating from a yeast. A suitable yeast may in particular be selected amongst the group of Candida, Hansenula, Kluyveromyces, Yarrowia, Schizosaccharomyces, Pichia, Yarrowia and Saccharomyces.

[0050] It will be clear to the person skilled in the art that use can be made of a biocatalyst wherein a naturally occurring biocatalytic moiety (such as an enzyme) is expressed (wild type) or a mutant of a naturally occurring biocatalytic moiety with suitable activity in a method according to the invention. Properties of a naturally occurring biocatalytic moiety may be improved by biological techniques known to the skilled person, e.g. by molecular evolution or rational design. Mutants of wild-type biocatalytic moieties can for example be made by modifying the encoding DNA of an organism capable of producing a biocatalytic moiety (such as an enzyme) using mutagenesis techniques known to the person skilled in the art. These include random mutagenesis, site-directed mutagenesis, directed evolution, and gene recombination. In particular the DNA may be modified such that it encodes an enzyme that differs by at least one amino acid from the wild-type enzyme, so that it encodes an enzyme that comprises one or more amino acid substitutions, deletions and/or insertions compared to the wild-type, or such that the mutants combine sequences of two or more parent enzymes or by effecting the expression of the thus modified DNA in a suitable (host) cell. The latter may be achieved by methods known to the skilled person such as codon optimisation or codon pair optimisation, e.g. based on a method as described in WO 2008/000632.

[0051] A mutant biocatalyst may have improved properties, for instance with respect to one or more of the following aspects: selectivity towards the substrate, activity, stability, solvent tolerance, pH profile, temperature profile, substrate profile, susceptibility to inhibition, cofactor utilisation and substrate-affinity. Mutants with improved properties can be identified by applying e.g. suitable high through-put screening or selection methods based on such methods known to the skilled person in the art.

[0052] In accordance with the invention, AKP is prepared from AKG. The AKG may in principle be obtained in any way. In particular, AKG may be obtained biocatalytically by providing the heterologous biocatalyst with a suitable carbon source that can be converted into AKG, for instance by fermentation of the carbon source. In an advantageous method AKG is prepared making use of a whole cell biotransformation of the carbon source to form AKG.

[0053] The carbon source may in particular contain at least one compound selected from the group of monohydric alcohols, polyhydric alcohols, carboxylic acids, carbon dioxide, fatty acids, glycerides, including mixtures comprising any of said compounds. Suitable monohydric alcohols include methanol and ethanol, Suitable polyols include glycerol and carbohydrates. Suitable fatty acids or glycerides may in particular be provided in the form of an edible oil, preferably of plant origin.

[0054] In particular a carbohydrate may be used, because usually carbohydrates can be obtained in large amounts from a biologically renewable source, such as an agricultural product, preferably an agricultural waste-material. Preferably a carbohydrate is used selected from the group of glucose, fructose, sucrose, lactose, saccharose, starch, cellulose and hemi-cellulose. Particularly preferred are glucose, oligosaccharides comprising glucose and polysaccharides comprising glucose.

[0055] In an embodiment of the invention AKG is converted into AKA using a biocatalyst for the conversion of AKG into AKA, part of said biocatalyst originating from the AAA pathway for lysine biosynthesis. Such conversion may involve a single or a plurality of reaction steps, which steps may be catalysed by one or more biocatalysts.

[0056] The biocatalyst for catalysing the conversion of AKG into AKA or parts thereof may be homologous or heterologous. In particular, the biocatalyst forming part of the AAA pathway for lysine biosynthesis may be found in an organism selected from the group of yeasts, fungi, archaea and bacteria, in particular from the group of Penicillium, Cephalosporium, Paecilomyces, Trichophytum, Aspergillus, Phanerochaete, Emericella, Ustilago, Schizosaccharomyces, Saccharomyces, Candida, Kluyveromyces, Yarrowia, Pichia, Hansenula, Thermus, Deinococcus, Pyrococcus, Sulfolobus, Thermococcus, Methanococcus, Methanosarcina, Methanocaldococcus, Methanosphaera, Methanopyrus, Methanobrevibacter, Methanospirillum and Methanothermobacter. A suitable biocatalyst may be found in an organism able to produce homocitrate,e.g. a biocatalyst for the nitrogenase complex in nitrogen fixing bacteria such as cyanobacteria (e.g. Anabaena, Microcystis, Synechocystis) Rhizobiales (e.g. Rhizobium, Bradyrhizobium), γ-proteobacteria (e.g. Pseudomonas, Azotobacter, Klebsiella) and actinobacteria (e.g. Frankia). Thus, if a biocatalyst is used based on a host cell naturally comprising the AAA pathway for lysine biosynthesis or parts thereof, this system may be homologous.

[0057] In a preferred embodiment of the invention a high productivity of AKA by the biocatalyst is desired. A biocatalyst containing the AAA pathway for lysine biosynthesis or parts thereof may be modified by methods known in the art such as mutation/screening or metabolic engineering to this effect. A high level of AKA can be generated by increasing the activity of enzymes involved in its formation and/or decreasing the activity involved in its conversion to e.g. amino adipate.

[0058] Enzymes involved in formation of AKA include homocitrate synthase (EC 2.3.3.14), homo aconitase (EC 4.2.1.36), and homoisocitrate dehydrogenase (EC 1.1.1.87). The activity for these enzymes in the host cell can be increased by methods known in the art such as (over-) expression of genes encoding the respective enzyme and/or functional homologues, alleviating inhibitions by substrates, products or other compounds, or improving catalytic properties of the enzymes by molecular evolution or rational design. A preferred method to perform directed evolution may be based on WO 2003/010183.

[0059] As it is undesired that the AKA that is produced is converted to aminoadipate (AAA)—which would be a further step in the pathway for lysine biosynthesis—it is preferred that the heterologous biocatalyst has low or no activity of an enzyme catalysing this conversion, in particular an aminotransferase, such as aminoadipate aminotransferase (EC 2.6.1.39) or amino acid dehydrogenase capable of catalysing this conversion. Thus, in case the host cell providing the biocatalyst comprises a gene encoding such an enzyme, such gene is preferably inactivated, knocked out, or the expression of such gene is reduced. As this step is essential in the AAA pathway for lysine production a host cell which has limited, minimal activity to supply the required amount of lysine for growth and maintenance but is not capable of high level conversions of AKA to AAA is advantageous. In particular in case Penicillium chrysogenum is the host, the aminotransferase may have the sequence of Sequence ID 68, or a homologue thereof.

[0060] Inactivation of a gene encoding an undesired activity may be accomplished, by several methods. One approach is a temporary one using an anti-sense molecule or RNAi molecule (e.g. based on Kamath et al. 2003. Nature 421:231-237). Another is using a regulatable promoter system, which can be switched off using external triggers like tetracycline (e.g. based on Park and Morschhauser, 2005, Eukaryot. Cell. 4:1328-1342). Yet another one is to apply a chemical inhibitor or a protein inhibitor or a physical inhibitor (e.g. based on Tour et al. 2003. Nat Biotech 21:1505-1508). A much preferred method is to remove the complete gene(s) or a part thereof, encoding the undesired activity. To obtain such a mutant one can apply state of the art methods like Single Cross-Over Recombination or Double Homologous Recombination. For this, one needs to construct an integrative cloning vector that may integrate at the predetermined target locus in the chromosome of the host cell. In a preferred embodiment of the invention, the integrative cloning vector comprises a DNA fragment, which is homologous to a DNA sequence in a predetermined target locus in the genome of host cell for targeting the integration of the cloning vector to this predetermined locus. In order to promote targeted integration, the cloning vector is preferably linearized prior to transformation of the host cell. Linearization is preferably performed such that at least one but preferably either end of the cloning vector is flanked by sequences homologous to the target locus. The length of the homologous sequences flanking the target locus is preferably at least 0.1 kb, even preferably at least 0.2 kb, more preferably at least 0.5 kb, even more preferably at least 1 kb, most preferably at least 2 kb. The length that finally is best suitable in an experiment depends on the organism, the sequence and length of the target DNA.

[0061] The efficiency of targeted integration of a nucleic acid construct into the genome of the host cell by homologous recombination, i.e. integration in a predetermined target locus, is preferably increased by augmented homologous recombination abilities of the host cell. Such phenotype of the cell preferably involves a deficient hdfA or hdfB gene as described in WO 05/95624. WO 05/95624 discloses a preferred method to obtain a filamentous fungal cell comprising increased efficiency of targeted integration by preventing non-homologous random integration of DNA fragments into the genome. The vector system may be a single vector or plasmid or two or more vectors or plasmids, which together contain the total DNA to be introduced into the genome of the host cell.

[0062] Fungal cells may be transformed by protoplast formation, protoplast transformation, and regeneration of the cell wall. Suitable procedures for transformation of fungal host cells are described in EP 238023 and Yelton et al. (1984. Proc. Nat. Acad. Sci. USA 81:1470-1474). Suitable procedures for transformation of filamentous fungal host cells using Agrobacterium tumefaciens are described by de Groot M. J. et al. (1998. Nat. Biotechnol. 16:839-842. Erratum in: Nat. Biotechnol. 1998. 16:1074). Other methods like electroporation, described for Neurospora crassa, may also be applied.

[0063] Fungal cells are transfected using co-transformation, i.e. along with gene(s) of interest also a selectable marker gene is transformed. This can be either physically linked to the gene of interest (i.e. on a plasmid) or on a separate fragment. Following transfection transformants are screened for the presence of this selection marker gene and subsequently analyzed for the integration at the preferred predetermined genomic locus. A selectable marker is a product, which provides resistance against a biocide or virus, resistance to heavy metals, prototrophy to auxotrophs and the like. Useful selectable markers include, but are not limited to, amdS (acetamidase), argB (ornithinecarbamoyltransferase), bar (phosphinothricinacetyl-transferase), hygB (hygromycin phosphotransferase), niaD (nitrate reductase), pyrG (orotidine-5′-phosphate decarboxylase), sC or sutB (sulfate adenyltransferase), trpC (anthranilate synthase), ble (phleomycin resistance protein), as well as equivalents thereof. The most preferred situation is providing a DNA molecule comprising a first DNA fragment comprising a desired replacement sequence (i.e. the selection marker gene) flanked at its 5′ and 3′ sides by DNA sequences substantially homologous to sequences of the chromosomal DNA flanking the target sequence. Cells wherein the target sequence in the chromosomal DNA sequence is replaced by the desired replacement sequence can be selected by the presence of the selectable marker of the first DNA fragment. To increase the relative frequency of selecting the correct mutant microbial strain, a second DNA fragment comprising an expression cassette comprising a gene encoding a selection marker and regulatory sequences functional in the eukaryotic cell can be operably linked to the above described fragment (i.e. 5′-flank of target locus+selection marker gene+3′-flank of target locus) and cells wherein the target sequence in the chromosomal DNA sequence is replaced by the desired replacement sequence can be selected by the presence of the selectable marker of the first DNA fragment and the absence of the second selection marker gene.

[0064] In case the enzyme system forming part of the aminoadipate pathway for lysine biosynthesis is heterologous to the host cell, it is preferred that no genes are included into the host cell that encode an enzyme catalysing the conversion of ketoadipate into aminoadipate. The term ‘enzyme system’ is in particular used herein for a single enzyme or a group of enzymes whereby a specific conversion can be catalysed. Said conversion may comprise one or more chemical reactions with known or unknown intermediates e.g. the conversion of AKG into AKA or the conversion of AKA into AKP. Such system may be present inside a cell or isolated from a cell. It is known that aminotransferases often have a wide substrate range. It may be desired to decrease activity of one or more such enzymes present in a host cell such that activity in the conversion of AKA to AAA is reduced, whilst maintaining relevant catalytic functions for biosynthesis of other amino acids or cellular components. Also a host cell devoid of any other enzymatic activity resulting in the conversion of AKA to an undesired side product is preferred.

[0065] In a further embodiment, AKG is converted into AKA, making use of at least one heterologous biocatalyst catalysing the C₁-elongation of AKG into AKA. One or more biocatalysts may be used. Said biocatalyst or biocatalysts may comprise one or enzymes originating from one or more source organisms (e.g. comprise more than one enzyme originating from different source organisms). A suitable biocatalyst for preparing AKA from AKG may in particular be selected amongst biocatalysts catalysing C₁-elongation of alpha-ketoglutaric acid into alpha-ketoadipic acid and/or C₁-elongation of alpha-ketoadipic acid into alpha-ketopimelic acid.

[0066] AKA prepared from AKG may thereafter be converted into AKP, making use of at least one heterologous biocatalyst catalysing the elongation of AKA into AKP. These biocatalysts may be the same as or different from the biocatalysts catalysing the conversion of AKG into AKA by C₁-elongation. One or more than one biocatalyst may be used for conversion of AKA to AKP. Said biocatalyst(s) may comprise one or more enzymes originating from one or more source organisms (e.g. comprise more than one enzyme originating from different source organisms).

[0067] A biosynthetic pathway making use of C₁-elongation is known to exist in methanogenic Archaea as part of coenzyme B biosynthesis and part of biotin biosynthesis. Coenzyme B is considered essential for methanogenesis in these organisms and alpha-ketosuberate is an important intermediate in coenzyme B biosynthesis. In such methanogenic Archaea alpha-ketoglutaric acid is converted to alpha-ketoadipic acid, then alpha-ketopimelic acid and finally alpha-ketosuberic acid by successive addition of methylene groups following a plurality of reaction steps (see also FIG. 1):

a. alpha-keto-acid of length Cₙ+acetyl-CoA→homoₙcitrate+CoA-SH (steps 1, 5 and 9 in FIG. 1)
b. homoₙ-citrate← →homoₙ-aconitate (catalyzed by homoₙ-citrate dehydratase (steps 2, 6 and 10 in FIG. 1)
c. homoₙaconitate← →isohomoₙ-citrate (steps 3, 7 and 11) in FIG. 1)
d. homoₙ-isocitrate+NADP⁺→alpha-keto-acid of length Cₙ₊₁+NADPH+H⁺+CO₂ (steps 4, 8 and 12 in FIG. 1)
wherein n is selected from 1-4.

[0068] This repetitive reaction sequence has been described for the methanogens Methanosarcina thermophila and Methanocaldococcus jannashii. Similar non-iterative reactions are involved in C₁-extension of other α-ketocarboxylic acids in other metabolic pathways such as the conversion of oxaloacetate to α-ketoglutarate in the oxidative citrate cycle, conversion of alpha-isovalerate to α-isocaproate as part in the isopropylmalate pathway to leucine, conversion of alpha-ketoglutarate to α-ketoadipate in the AAA pathway to lysine, conversion of pyruvate to alpha-ketobutyrate in the pyruvate pathway to isoleucine, and in the conversion of maleate to pyruvate. Collectively these reactions are defined as “C₁-elongation”.

[0069] Several genes and enzymes involved in C₁-elongations have been described and characterised from M. jannashii. It was shown that these enzymes and the encoding genes are similar to each other and to other enzymes and their encoding genes involved in C₁-elongations in other organisms. A subset of enzymes for the iterative elongation of alpha-ketoglutarate to alpha-ketosuberate via alpha-ketoadipate and alpha-ketopimelate has been characterised biochemically and was called “Aks”. Some of the genes encoding these enzymes have been identified in the genome sequence of M. jannashii and others have been proposed.

[0070] The inventors have realised that C₁-elongation can be used to prepare AKA or AKP on an industrial scale, such that AKA or AKP can be made available as an intermediate for the preparation of special compounds or commodity products, such as diaminohexane or caprolactam, by incorporating one or more nucleic acid sequences encoding an enzyme system involved in C₁ elongation into a suitable host cell.

[0071] The enzyme system for catalysing C₁ elongation thereby forming AKA or AKP may in particular comprise one or more enzymes selected from the group of homoₙ-citrate synthases, homoₙ-aconitases and iso-homoₙ-citrate dehydrogenases, wherein n is selected from 1-4.

[0072] A homoₙ-citrate synthase may in particular catalyse “reaction a” of the C₁-elongation. A homoₙ-citrate synthase is defined as an enzyme capable of condensing an alpha-keto carboxylic diacid of chain length C₄₊ₙ with acetyl-CoA resulting in formation of homoₙ-citrate wherein n is selected from 1-4. The homoₙ-citrate synthase may in particular be an enzyme that is or can be classified in EC 2.3.3. More in particular, a suitable homoₙ-citrate synthase may be selected amongst homocitrate synthases (EC 2.3.3.14), or may be classified in EC 2.3.3.1, 2.3.3.2, 2.3.3.4 or 2.3.3.9. Particularly preferred is AksA or a homologue thereof having homo₍ₙ₎citrate activity.

[0073] A homoₙ-aconitase may in particular catalyse “reaction b” and/or “reaction c” of the C₁-elongation. A homoₙ-aconitase is defined as an enzyme capable of converting homoₙ-citrate to iso-homoₙ-citrate via a homoₙ-aconitate intermediate or at least one of the reversible half reactions (i.e. homoₙ-aconitate to homoₙ-citrate or homoₙ-aconitate to iso-homoₙ-citrate) wherein n is selected from 1-4. The homoₙ-aconitase may in particular be an enzyme that is or can be classified in EC 4.2.1. More in particular, a suitable homoₙ-aconitase may be selected amongst homoaconitase (EC 4.2.1.36), or may be classified in EC 4.2.1.3, 4.2.1.33, 4.2.1.79 and 4.2.1.99. Particularly preferred is an enzyme selected from the group of AksD, AksE, homologues of AksD and homologues of AksE having homoₙ-aconitase activity.

[0074] A homoₙ-isocitrate dehydrogenase may in particular catalyse “reaction d” of the C₁-elongation. A iso-homoₙ-citrate dehydrogenase is defined as an enzyme capable of converting iso-homoₙ-citrate to an α-keto-carboxylic-diacid of chain length C₅₊ₙ wherein n is selected from 1-4 and thereby releasing CO₂. The iso-homoₙ-citrate dehydrogenase may in particular be an enzyme that is or can be classified in EC 1.1.1. More in particular, a suitable iso-homoₙ-citrate dehydrogenase may be selected amongst iso-homocitrate dehydrogenase (EC 1.1.1.87), or may be classified in EC 1.1.136, 1.1.137, 1.1.1.38, 1.1.139, 1.1.1.40, 1.1.1.41, 1.1.1.42, 1.1.1.82, 1.1.1.83, 1.1.1.84, 1.1.1.85 and 1.1.1.286. Particularly preferred is AksF or a homologue thereof having homoₙ-isocitrate dehydrogenase activity.

[0075] Methanogens may serve as biocatalysts for production of AKP or can be used as a source for such biocatalysts. Suitable biocatalysts may be identified by searching for protein and nucleotide sequences similar to known enzymes from C₁-elongations pathways. Similar sequences can efficiently be identified in sequence databases using bioinformatic techniques well known in the art. Molecular biology methods known in the art such as Southern hybridization or PCR techniques employing degenerate oligonucleotides can be used to identify similar genes in cultured organisms and environmental samples. After cloning and sequencing such biocatalysts may be utilized for AKP production in a heterologous host.

[0076] In particular, one or more enzymes for catalysing C₁ elongation may be used from a methanogen selected from the group of Methanococcus, Methanospirillum, Methanocaldococcus, Methanosarcina, Methanothermobacter, Methanosphaera, Methanopyrus and Methanobrevibacter. More specifically one or more enzymes may be used from a methanogen selected from the group of Methanothermobacter thermoautotropicum, Methanococcus maripaludis, Methanosphaera stadtmanae, Methanopyrus kandleri, Methanosarcina thermophila, Methanobrevibacter smithii, Methanococcus vannielii, Methanospirillum hungatei, Methanosaeta thermophila Methanosarcina acetivorans and Methanococcus aeolicus.

[0077] Further, suitable enzymes for catalysing C₁ elongation of AKG and/or AKA may e.g. be found in organisms comprising an enzyme system for catalysing lysine biosynthesis via the aminoadipate pathway or parts thereof or contain homologues thereof as part of other metabolism such as e.g. homocitrate synthase involved in nitrogen fixation. In particular organisms selected from the group of yeasts and fungi, such as Penicillium, Cephalosporium, Aspergillus, Phanerochaete, Emericella, Ustilago, Paecilomyces, Trichophytum, Yarrowia, Hansenula, Schizosaccharomyces, Saccharomyces, Candida, Kluyveromyces, in particular Penicillium chrysogenum, Penicillium notatum, Paecilomyces carneus, Paecilomyces persinicus, Cephalosporium acremonium, Aspergillus niger, Emericella nidulans, Aspergillys oryzae, Ustilago maydis, Schizosaccharomyces pombe, Saccharomyces cerevisiae, Yarrowia lipolytica, Hansenula polymorpha, Candida albicans, Candida maltosa, and Kluyveromyces lactis; bacteria, such as Azotobacter, Pseudomonas, Klebsiella, Deinococcus, Thermus, in particular Azotobacter vinelandii, Pseudomonas stutzerii, Klebsiella pneumoniae, Deinococcus radiourans, Deinococcus geothermalis, Thermus thermophilus; and archae, such as Pyrococcus, Sulfolobus, Thermococcus, Methanococcus, Methanocaldococcus, Methanosphaera, Methanopyrus, Methanospirillum, Methanobrevibacter, Methanosarcina and Methanothermobacter, in particular Pyrococcus horikoshii, Sulfolobus solfataricus, Thermococcus kodakarensis, Methanococcus maripaludis, Methanococcus aeolicus, Methanococcus vannielii, Methanoca/dococcus jannashii, Methanosphaera stadtmanae, Methanopyrus kandleri, Methanobrevibacter smithii, Methanosarcina thermophilus, Methanospirillum hungatei, Methanosaeta thermophila, Methanosarcina acetivorans and Methanothermobacter thermoautotrophicum. Such yeast, fungus, bacterium, archaeon or other organism may in particular provide a homocitrate synthase capable of catalysing “reaction a” in the elongation of AKG to AKA and optionally the elongation of AKA to APK.

[0078] Further, suitable biocatalysts for catalysing a reaction step in the preparation of AKP may be found in Asplenium or Hydnocarpus, in particular Asplenium septentrionale or Hydnocarpus anthelminthica, which naturally are capable of producing AKP.

[0079] In a preferred method one or more enzymes selected from the group of Aks enzymes and homologues thereof, in particular from the group of AksA, AksD, AksE, AksF and homologues thereof are used. Examples of homologues for these Aks enzymes and the genes encoding these enzymes are given in the Tables on the following pages.

| | Enzyme | | | |
|---|---|---|---|---|
| Step | name | Organism | gene | Protein |
| 1 | AksA | Methanocaldococcus jannashii | MJ0503 | NP_247479 |
| | | Methanothermobacter thermoautotropicum ΔH | MTH1630 | NP_276742 |
| | | Methanococcus maripaludis S2 | MMP0153 | NP_987273 |
| | | Methanococcus maripaludis C5 | MmarC5_1522 | YP_001098033 |
| | | Methanococcus maripaludis C7 | MmarC7_1153 | YP_001330370 |
| | | Methanospaera stadtmanae DSM 3091 | Msp_0199 | YP_447259 |
| | | Methanopyrus kandleri AV19 | MK1209 | NP_614492 |
| | | Methanobrevibacter smithii ATCC35061 | Msm_0722 | YP_001273295 |
| | | Methanococcus vannielii SB | Mevan_1158 | YP_001323668 |
| | | Klebsiella pneumoniae | nifV | P05345 |
| | | Azotobacter vinelandii | nifV | P05342 |
| | | Pseudomonas stutzerii | nifV | ABP79047 |
| | | Methanococcus aeolicus Nankai 3 | Maeo_0994 | YP_001325184 |
| 2, 3 | AksD | Methanocaldococcus jannashii | MJ1003 | NP_247997 |
| | | Methanothermobacter thermoautotropicum ΔH | MTH1386 | NP_276502 |
| | | Methanococcus maripaludis S2 | Mmp1480 | NP_988600 |
| | | Methanococcus maripaludis C5 | MmarC5_0098 | YP_001096630 |
| | | Methanococcus maripaludis C7 | MmarC7_0724 | YP_001329942 |
| | | Methanospaera stadtmanae DSM 3091 | Msp_1486 | YP_448499 |
| | | Methanopyrus kandleri AV19 | MK1440 | NP_614723 |
| | | Methanobrevibacter smithii ATCC35061 | Msm_0723 | YP_001273296 |
| | | Methanococcus vannielii SB | Mevan_0789 | YP_001323307 |
| | | Methanococcus aeolicus Nankai 3 | Maeo_0311 | YP_001324511 |
| | | Methanosarcina acetivorans | MA3085* | NP_617978* |
| | | Methanospirillum hungatei JF-1 | Mhun_1800* | YP_503240* |
| | | Methanosaeta thermophila PT | Mthe_0788* | YP_843217* |
| | | Methanosphaera stadtmanae DSM 3091 | Msp_1100* | YP_448126* |

References to gene and protein can be found via www.ncbi.nlm.nih.gov/(for listed gene/protein marked with an *: as available on 2 Mar. 2010, for the others: as available on 15 Apr. 2008).

| | Enzyme | | | |
|---|---|---|---|---|
| Step | name | Orgamism | gene | Protein |
| 2, 3 | AksE | Methanocaldococcus jannashii | MJ1271 | NP_248267 |
| | | Methanothermobacter thermoautotropicum ΔH | MTH1387 | NP_276503 |
| | | Methanococcus maripaludis S2 | MMP0381 | NP_987501 |
| | | Methanococcus maripaludis C5 | MmarC5_1257 | YP_001097769 |
| | | Methanococcus maripaludis C7 | MmarC7_1379 | YP_001330593 |
| | | Methanospaera stadtmanae DSM 3091 | Msp_1485 | YP_448498 |
| | | Methanopyrus kandleri AV19 | MK0781 | NP_614065 |
| | | Methanobrevibacter smithii ATCC35061 | Msm_0847 | YP_001273420 |
| | | Methanococcus vannielii SB | Mevan_1368 | YP_001323877 |
| | | Methanococcus aeolicus Nankai 3 | Maeo_0652 | YP_001324848 |
| | | Methanosarcina acetivorans | MA3751* | NP_618624* |
| | | Methanospirillum hungatei JF-1 | Mhun_1799* | YP_503239* |
| | | Methanosphaera stadtmanae DSM 3091 | Msp_0374* | YP_447420* |
| | | Methanosaeta thermophila PT | Mthe_0853* | YP_843282* |
| 4 | AksF | Methanocaldococcus jannashii | MJ1596 | NP_248605 |
| | | Methanothermobacter thermoautotropicum ΔH | MTH184 | NP_275327 |
| | | Methanococcus maripaludis S2 | MMP0880 | NP988000 |
| | | Methanococcus maripaludis C5 | MmarC5_0688 | YP001097214 |
| | | Methanococcus maripaludis C7 | MmarC7_0128 | YP_001329349 |
| | | Methanospaera stadtmanae DSM 3091 | Msp_0674 | YP_447715 |
| | | Methanopyrus kandleri AV19 | MK0782 | NP_614066 |
| | | Methanobrevibacter smithii ATCC35061 | Msm_0373 | YP001272946 |
| | | Methanococcus vannielii SB | Mevan_0040 | YP_001322567 |
| | | Methanococcus aeolicus Nankai 3 | Maeo_1484 | YP_001325672 |
| | | Methanosarcina acetivorans | MA3748* | NP_618621* |
| | | Methanospirillum hungatei JF-1 | Mhun_1797* | YP_503237* |
| | | Methanosphaera stadtmanae DSM 3091 | Msp_0674* | YP_447715* |
| | | Methanosaeta thermophila PT | Mthe_0855* | YP_843284* |
| | | Methanobrevibacter smithii ATCC 35061 | Msm_1298* | YP_001273871* |

References to gene and protein can be found via www.ncbi.nlm.nih.gov/((for listed gene/protein marked with an *: as available on 2 Mar. 2010, for the others: as available on 15 Apr. 2008).

[0080] In particular an enzyme may be used represented by any of the sequence ID's 4, 5, 6, 7, 8, 9, 10, 11, 12, 13, 261, 264, 267, 273, 276, 279, 282 (AksA), 14, 15, 16, 17, 18, 19, 20, 21, 22, 23, 186, 189, 192, 195, 225, 228, 231, 234 (AksD), 24, 25, 26, 27, 28, 29, 30, 31, 32, 33, 198, 201, 204, 207, 237, 240, 243, 246 (AksE), 34, 35, 36, 37, 38, 39, 40, 41, 42, 43, 210, 213, 216, 219, 222, 249, 252, 255, 258 (AksF), 44, 45, 46, 47, 48, 49, 50, 51, 52, 53 (AksA homologues), 54, 55, 56, 57, 58, 59, 60, 61 (AksD homologues), 62, 63, 64, 65, 66, 67 (AksF homologues), 69, 70, 71, 72, 73, 74, 75, 76, 77, 270 (AksA homologues).

[0081] AKP prepared in a method of the invention may further be used in the preparation of another compound, or be used as such, e.g. as a chemical for biochemical research or as a pH-buffer compound, e.g. for use in an preparative or analytical separation technique such as liquid chromatography or capillary electrophoresis. In particular, if desired, AKP may be used for the preparation of AAP, 5-FVA, 6-ACA or alpha-ketosuberic acid.

[0082] A method for preparing alpha-ketosuberic acid from AKP in a method of the invention comprises subjecting the AKP to C₁-elongation, using a biocatalyst as described herein. Thus, after AKP has been prepared by C₁-elongation, C1-elongation can be re-iterated once more, thereby forming alpha-ketosuberic acid from alpha-ketopimelic acid. To achieve this the same set of enzymes or homologues thereof as described above for the formation of AKP from AKA by C₁-elongation may be used. The formed alpha-ketosuberic acid can further be converted into 7-aminoheptanoic acid using the same concept as described herein for the conversion of AKP to 6-ACA, namely by using one or more biocatalysts selected from the group of decarboxylases, aminotransferases and amino acid dehydrogenases capable of catalysing a reaction step in a method of the invention. Alternatively, one or more of such subsequent reaction steps can be performed chemically. 7-Aminoheptanoic acid prepared in such way can then be cyclised to form the corresponding C₇-lactam (also referred to as azocan-2-one or zeta-aminoenantholactam) and/or polymerized directly or via the said C₇-lactam for the production of nylon-7 or copolymers thereof.

[0083] The inventors have realised that AKP can be converted into 6-ACA by a method wherein first AKP is decarboxylated to form 5-FVA after which 6-ACA can be prepared from 5-FVA using an amino transfer reaction or wherein first AKP is subjected to an amino transfer reaction to form AAP, after which 6-ACA can be prepared from AAP by a decarboxylation reaction.

[0084] In a preferred method for preparing 6-ACA, the preparation comprises a biocatalytic reaction in the presence of a biocatalyst capable of catalysing the decarboxylation of an alpha-keto acid or an amino acid (i.e. a compound comprising at least one carboxylic acid group and at least one amino group). An enzyme having such catalytic activity may therefore be referred to as an alpha-keto acid decarboxylase respectively an amino acid decarboxylase.

[0085] Said acid preferably is a diacid, wherein the said biocatalyst is selective towards the acid group next to the keto- or amino-group.

[0086] In general, a suitable decarboxylase has alpha-ketopimelate decarboxylase activity, capable of catalysing the conversion of AKP into 5-FVA or alpha-aminopimelate decarboxylase activity, capable of catalysing the conversion of AAP to 6-ACA.

[0087] An enzyme capable of decarboxylating an alpha-keto acid or an amino acid may in particular be selected from the group of decarboxylases (E.C. 4.1.1), preferably from the group of glutamate decarboxylases (EC 4.1.1.15), diaminopimelate decarboxylases (EC 4.1.1.20), aspartate 1-decarboxylases (EC 4.1.1.11), branched chain alpha-keto acid decarboxylases, alpha-ketoisovalerate decarboxylases (EC 1.2.4.4), alpha-ketoglutarate decarboxylases (EC 4.1.1.71), and pyruvate decarboxylases (EC 4.1.1.1).

[0088] One or more other suitable decarboxylases may in particular be selected amongst the group of oxalate decarboxylases (EC 4.1.1.2), oxaloacetate decarboxylases (EC 4.1.1.3), acetoacetate decarboxylases (EC 4.1.1.4), valine decarboxylases/leucine decarboxylases (EC 4.1.1.14), 3-hydroxyglutamate decarboxylases (EC 4.1.1.16), ornithine decarboxylases (EC 4.1.1.17), lysine decarboxylases (EC 4.1.1.18), arginine decarboxylases (EC 4.1.1.19), 2-oxoglutarate decarboxylases (EC 4.1.1.71), and diaminobutyrate decarboxylases (EC 4.1.1.86)

[0089] A decarboxylase may in particular be a decarboxylase of an organism selected from the group of squashes; cucumbers; yeasts; fungi, e.g. Saccharomyces cerevisiae, Candida flareri, Hansenula sp., Kluyveromyces marxianus, Rhizopus javanicus, Zymomonas mobilis, more in particular mutant 1472A from Zymomonas mobilis, and Neurospora crassa; mammals, in particular from mammalian brain; and bacteria. For instance glutamate decarboxylase or aspartate decarboxylase from Eschericia coli (E. coli) may be used, or glutamate decarboxylase from Neurospora crassa, Mycobacterium leprae, Clostridium perfringens, Lactobacillus brevis, Mycobacterium tuberculosis, Streptococcus or Lactococcus may be used. Examples of Lactococcus species from which the glutamate decarboxylase may originate in particular include Lactococcus lactis, such as Lactococcus lactis strain B1157, Lactococcus lactis IFPL730, more in particular Lactococcus lactis var. maltigenes (formerly named Streptococcus lactis var. maltigenes). An oxaloacetate decarboxylase from Pseudomonas may in particular be used.

[0090] In a preferred method of the invention, the preparation of 6-ACA comprises an enzymatic reaction in the presence of an enzyme capable of catalysing a transamination reaction in the presence of an amino donor, selected from the group of aminotransferases (E.C. 2.6.1).

[0091] In general, a suitable aminotransferase has 6-aminocaproic acid 6-aminotransferase activity, capable of catalysing the conversion of 5-FVA into 6-ACA oρ alpha-aminopimelate 2-aminotransferase activity, capable of catalysing the conversion of AKP into AAP.

[0092] The aminotransferase may in particular be selected amongst the group of beta-aminoisobutyrate: alpha-ketoglutarate aminotransferases, beta-alanine aminotransferases, aspartate aminotransferases, 4-amino-butyrate aminotransferases (EC 2.6.1.19), L-lysine 6-aminotransferase (EC 2.6.1.36), 2-aminoadipate aminotransferases (EC 2.6.1.39), 5-aminovalerate aminotransferases (EC 2.6.1.48), 2-aminohexanoate aminotransferases (EC 2.6.1.67), lysine: pyruvate 6-aminotransferases (EC 2.6.1.71) and aromatic amino acid aminotransferase (EC 2.6.1.57).

[0093] In an embodiment an aminotransferase may be selected amongst the group of alanine aminotransferases (EC 2.6.1.2), leucine aminotransferases (EC 2.6.1.6), alanine-oxo-acid aminotransferases (EC 2.6.1.12), beta-alanine-pyruvate aminotransferases (EC 2.6.1.18), (S)-3-amino-2-methylpropionate aminotransferases (EC 2.6.1.22), L,L-diaminopimelate aminotransferase (EC 2.6.1.83).

[0094] The aminotransferase may in particular be selected amongst aminotransferases from Vibrio, in particular Vibrio fluvialis; Pseudomonas, in particular Pseudomonas aeruginosa; Bacillus, in particular Bacillus weihenstephanensis; Mercurialis, in particular Mercurialis perennis, more in particular shoots of Mercurialis perennis; Asplenium, more in particular Asplenium unilaterale or Asplenium septentrionale; Ceratonia, more in particular Ceratonia siliqua; a mammal; or yeast, in particular Saccharomyces cerevisiae. In case the enzyme is of a mammal, it may in particular originate from mammalian kidney, from mammalian liver, from mammalian heart or from mammalian brain. For instance a suitable enzyme may be selected amongst the group of β-aminoisobutyrate: alpha-ketoglutarate aminotransferase from mammalian kidney, in particular beta-aminoisobutyrate: alpha-ketoglutarate aminotransferase from hog kidney; beta-alanine aminotransferase from mammalian liver, in particular beta-alanine aminotransferase from rabbit liver; aspartate aminotransferase from mammalian heart; in particular aspartate aminotransferase from pig heart; 4-amino-butyrate aminotransferase from mammalian liver, in particular 4-amino-butyrate aminotransferase from pig liver; 4-amino-butyrate aminotransferase from mammalian brain, in particular 4-aminobutyrate aminotransferase from human, pig, or rat brain; alpha-ketoadipate-glutamate aminotransferase from Neurospora, in particular alpha-ketoadipate: glutamate aminotransferase from Neurospora crassa; 4-amino-butyrate aminotransferase from E. coli, or alpha-aminoadipate aminotransferase from Thermus, in particular alpha-aminoadipate aminotransferase from Thermus thermophilus, and 5-aminovalerate aminotransferase from Clostridium in particular from Clostridium aminovalericum. A suitable 2-aminoadipate aminotransferase may e.g. be provided by Pyrobaculum islandicum.

[0095] In a specific embodiment, an aminotransferase is used comprising an amino acid sequence according to Sequence ID 2, 83, 86 or a homologue of any of these sequences.

[0096] In particular, the amino donor can be ammonia, ammonium ion, an amine or an amino acid. Suitable amines are primary amines and secondary amines. The amino acid may have a D- or L-configuration. Examples of amino donors are alanine, glutamate, isopropylamine, 2-aminobutane, 2-aminoheptane, phenylmethanamine, 1-phenyl-1-aminoethane, glutamine, tyrosine, phenylalanine, aspartate, beta-aminoisobutyrate, beta-alanine, 4-aminobutyrate, and alpha-aminoadipate.

[0097] In a further preferred embodiment, the method for preparing 6-ACA comprises a biocatalytic reaction in the presence of an enzyme capable of catalysing a reductive amination reaction in the presence of an ammonia source, selected from the group of oxidoreductases acting on the CH—NH₂ group of donors (EC 1.4), in particular from the group of amino acid dehydrogenases (E.C. 1.4.1). In general, a suitable amino acid dehydrogenase has 6-aminocaproic acid 6-dehydrogenase activity, catalysing the conversion of 5-FVA into 6-ACA or has alpha-aminopimelate 2-dehydrogenase activity, catalysing the conversion of AKP into AAP. In particular a suitable amino acid dehydrogenase be selected amongst the group of diaminopimelate dehydrogenases (EC 1.4.1.16), lysine 6-dehydrogenases (EC 1.4.1.18), glutamate dehydrogenases (EC 1.4.1.3; EC 1.4.1.4), and leucine dehydrogenases (EC 1.4.1.9).

[0098] In an embodiment, an amino acid dehydrogenase may be selected amongst an amino acid dehydrogenases classified as glutamate dehydrogenases acting with NAD or NADP as acceptor (EC 1.4.1.3), glutamate dehydrogenases acting with NADP as acceptor (EC 1.4.1.4), leucine dehydrogenases (EC 1.4.1.9), diaminopimelate dehydrogenases (EC 1.4.1.16), and lysine 6-dehydrogenases (EC 1.4.1.18).

[0099] An amino acid dehydrogenase may in particular originate from an organism selected from the group of Corynebacterium, in particular Corynebacterium glutamicum; Proteus, in particular Proteus vulgaris; Agrobacterium, in particular Agrobacterium tumefaciens; Geobacillus, in particular Geobacillus stearothermophilus; Acinetobacter, in particular Acinetobacter sp. ADP1; Ralstonia, in particular Ralstonia solanacearum; Salmonella, in particular Salmonella typhimurium; Saccharomyces, in particular Saccharomyces cerevisiae; Brevibacterium, in particular Brevibacterium flavum; and Bacillus, in particular Bacillus sphaericus, Bacillus cereus or Bacillus subtilis. For instance a suitable amino acid dehydrogenase may be selected amongst diaminopimelate dehydrogenases from Bacillus, in particular Bacillus sphaericus; diaminopimelate dehydrogenases from Brevibacterium sp.; diaminopimelate dehydrogenases from Corynebacterium, in particular diaminopimelate dehydrogenases from Corynebacterium glutamicum; diaminopimelate dehydrogenases from Proteus, in particular diaminopimelate dehydrogenase from Proteus vulgaris; lysine 6-dehydrogenases from Agrobacterium, in particular Agrobacterium tumefaciens, lysine 6-dehydrogenases from Geobacillus, in particular from Geobacillus stearothermophilus; glutamate dehydrogenases acting with NADH or NADPH as cofactor (EC 1.4.1.3) from Acinetobacter, in particular glutamate dehydrogenases from Acinetobactersp. ADP1; glutamate dehydrogenases (EC 1.4.1.3) from Ralstonia, in particular glutamate dehydrogenases from Ralstonia solanacearum; glutamate dehydrogenases acting with NADPH as cofactor (EC 1.4.1.4) from Salmonella, in particular glutamate dehydrogenases from Salmonella typhimurium; glutamate dehydrogenases (EC 1.4.1.4) from Saccharomyces, in particular glutamate dehydrogenases from Saccharomyces cerevisiae; glutamate dehydrogenases (EC 1.4.1.4) from Brevibacterium, in particular glutamate dehydrogenases from Brevibacterium flavum; and leucine dehydrogenases from Bacillus, in particular leucine dehydrogenases from Bacillus cereus or Bacillus subtilis.

[0100] In a specific embodiment, AKP is biocatalytically converted into 5-formylpentanoate (5-FVA) in the presence of a decarboxylase or other biocatalyst catalysing such conversion. A decarboxylase used in accordance with the invention may in particular be selected from the group of alpha-keto acid decarboxylases from Lactococcus lactis, Lactococcus lactis var. maltigenes or Lactococcus lactis subsp. cremoris; branched chain alpha-keto acid decarboxylases from Lactococcus lactis strain B1157 or Lactococcus lactis IFPL730; pyruvate decarboxylases from Saccharomyces cerevisiae, Candida flareri, Zymomonas mobilis, Hansenula sp., Rhizopus javanicus, Neurospora crassa, or Kluyveromyces marxianus; αλπηα-ketoglutarate decarboxylases from Mycobacterium tuberculosis; glutamate decarboxylases from E. coli, Lactobacillus brevis, Mycobacterium leprae, Neurospora crassa or Clostridium perfringens; and aspartate decarboxylases from E. coli.

[0101] Thereafter 5-FVA may be converted into 6-ACA. This can be done chemically: 6-ACA can be prepared in high yield by reductive amination of 5-FVA with ammonia over a hydrogenation catalyst, for example Ni on SiO₂/Al₂O₃ support, as described for 9-aminononanoic acid (9-aminopelargonic acid) and 12-aminododecanoic acid (12-aminolauric acid) in EP-A 628 535 or DE 4 322 065.

[0102] Alternatively, 6-ACA can be obtained by hydrogenation over PtO₂ of 6-oximocaproic acid, prepared by reaction of 5-FVA and hydroxylamine. (see e.g. F. O. Ayorinde, E. Y. Nana, P. D. Nicely, A. S. Woods, E. O. Price, C. P. Nwaonicha J. Am. Oil Chem. Soc. 1997, 74, 531-538 for synthesis of the homologous 12-aminododecanoic acid).

[0103] In an embodiment, the conversion of 5-FVA to 6-ACA may be performed biocatalytically in the presence of (i) an amino donor and (ii) an aminotransferase, an amino acid dehydrogenase or another biocatalyst capable of catalysing such conversion. In particular in such an embodiment the aminotransferase may be selected from the group of aminotransferases from Vibrio fluvialis, Pseudomonas aeruginosa or Bacillus weihenstephanensis; β-aminoisobutyrate:αλπηα-ketoglutarate aminotransferase from hog kidney; β-alanine aminotransferase from rabbit liver; aminotransferase from shoots from Mercurialis perennis; 4-aminobutyrate aminotransferase from pig liver or from human, rat, or pig brain; β-alanine aminotransferase from rabbit liver; and Llysine:alpha-ketoglutarate-ε-aminotransferase. In case an amino acid dehydrogenase is used, such amino acid dehydrogenase may in particular be selected from the group of lysine 6-dehydrogenases from Agrobacterium tumefaciens or Geobacillus stearothermophilus. Another suitable amino acid dehydrogenase may be selected from the group of diaminopimelate dehydrogenases from Bacillus sphaericus, Brevibacterium sp., Corynebacterium glutamicum, or Proteus vulgaris; from the group of glutamate dehydrogenases acting with NADH or NADPH as cofactor (EC 1.4.1.3) from Acinetobactersp. ADP1 or Ralstonia solanacearum; from the group of glutamate dehydrogenases acting with NADPH as cofactor (EC 1.4.1.4) from Salmonella typhimurium; from the group of glutamate dehydrogenases (EC 1.4.1.4) from Saccharomyces cerevisiae or Brevibacterium flavum; or from the group of leucine dehydrogenases from Bacillus cereus or Bacillus subtilis.

[0104] In a specific embodiment, AKP is chemically converted into 5-FVA. Efficient chemical decarboxylation of 2-keto carboxylic acid into the corresponding aldehyde can be performed by intermediate enamine formation using a secondary amine, for instance morpholine, under azeotropic water removal and simultaneous loss of CO₂, e.g. based on a method as described in Tetrahedron Lett. 1982, 23(4), 459-462. The intermediate terminal enamide is subsequently hydrolysed to the corresponding aldehyde. 5-FVA may thereafter be biocatalytically converted into 6-ACA by transamination in the presence of an aminotransferase or by enzymatic reductive amination by an amino acid dehydrogenase or another biocatalyst able of catalysing such conversion. Such aminotransferase or amino acid dehydrogenase may in particular be selected from the biocatalysts mentioned above when describing the conversion of 5-FVA to 6-ACA.

[0105] Alternatively, the conversion of 5-FVA to 6-ACA may be performed by a chemical method, e.g. as mentioned above.

[0106] In a specific embodiment, AKP is biocatalytically converted into AAP in the presence of (i) an aminotransferase, an amino acid dehydrogenase, or another biocatalyst capable of catalysing such conversion and (ii) an amino donor. Such aminotransferase used in accordance with the invention for the conversion of AKP to AAP may in particular be selected from the group of aspartate aminotransferases from pig heart; alpha-ketoadipate:glutamate aminotransferases from Neurospora crassa or yeast; aminotransferases from shoots from Mercurialis perennis; 4-aminobutyrate aminotransferases from E. coli; alpha-aminoadipate aminotransferases from Thermus thermophilus; aminotransferases from Asplenium septentrionale or Asplenium unilaterale; and aminotransferases from Ceratonia siliqua.

[0107] Suitable amino acid dehydrogenases may in particular be selected amongst the group of glutamate dehydrogenases acting with NADH or NADPH as cofactor (EC 1.4.1.3) from Acinetobactersp. ADP1 or Ralstonia solanacearum; glutamate dehydrogenases acting with NADPH as cofactor (EC 1.4.1.4) from Salmonella typhimurium, Saccharomyces cerevisiae, or Brevibacterium flavum; aminopimelate dehydrogenases from Bacillus sphaericus, Brevibacterium sp., Corynebacterium glutamicum, or Proteus vulgaris. Another suitable amino acid dehydrogenase may be selected from the group of lysine 6-dehydrogenases from Agrobacterium tumefaciens or Geobacillus stearothermophilus; or from the group of leucine dehydrogenases from Bacillus cereus or Bacillus subtilis.

[0108] Thereafter AAP may be chemically converted to 6-ACA by decarboxylation. This can be performed by heating in a high boiling solvent in the presence of a ketone or aldehyde catalyst. For example, amino acids are decarboxylated in good yields in cyclohexanol at 150-160° C. with 1-2 v/v % of cyclohexenone as described by M. Hashimoto, Y. Eda, Y. Osanai, T. Iwai and S. Aoki in Chem. Lett. 1986, 893-896. Similar methods are described in Eur. Pat. Appl. 1586553, 2005 by Daiso, and by S. D. Brandt, D. Mansell, S. Freeman, I. A. Fleet, J. F. Alder J. Pharm. Biomed. Anal. 2006, 41, 872-882.

[0109] Alternatively, the decarboxylation of AAP to 6-ACA may be performed biocatalytically in the presence of a decarboxylase or other biocatalyst catalysing such decarboxylation. The decarboxylase may be selected amongst decarboxylases capable of catalysing the decarboxylation of an alpha-amino acid. In particular, the decarboxylase may be selected from the group of glutamate decarboxylases from Curcurbita moschata, cucumber, yeast, or calf brain; and diaminopimelate decarboxylases (EC 4.1.1.20). A diaminopimelate decarboxylase may, e.g., be from an organism capable of synthesising lysine from diaminopimelate. Such organism may in particular be found amongst bacteria, archaea and plants. In particular, the diaminopimelate decarboxylase may be from a gram negative bacterium, for instance E. coli.

[0110] In a specific embodiment, AKP is chemically converted into AAP. AAP can be prepared from 2-oxopimelic acid by catalytic Leuckart-Wallach reaction as described for similar compounds. This reaction is performed with ammonium formate in methanol and [RhCp*cl₂]₂ as homogeneous catalyst (M. Kitamura, D. Lee, S. Hayashi, S. Tanaka, M. Yoshimura J. Org. Chem. 2002, 67, 8685-8687). Alternatively, the Leuckart-Wallach reaction can be performed with aqueous ammonium formate using [Ir^{III}Cp*(bpy)H₂O]SO₄ as catalyst as described by S. Ogo, K. Uehara and S. Fukuzumi in J. Am. Chem. Soc. 2004, 126, 3020-3021. Transformation of αλπηα-keto acids into (enantiomerically enriched) amino acids is also possible by reaction with (chiral) benzylamines and subsequent hydrogenation of the intermediate imine over Pd/C or Pd(OH)₂/C. See for example, R. G. Hiskey, R. C. Northrop J. Am. Chem. Soc. 1961, 83, 4798.

[0111] Thereafter AAP may be biocatalytically converted into 6-ACA, in the presence of a decarboxylase or another biocatalyst capable of performing such decarboxylation. Such decarboxylase may in particular be selected amongst the biocatalysts referred to above, when describing biocatalysts for the conversion of AAP to 6-ACA.

[0112] Alternatively, the conversion of AAP to 6-ACA may be performed by a chemical method, e.g. as mentioned above.

[0113] In a specific embodiment, AKP is biocatalytically converted into 5-FVA in the presence of a decarboxylase or other biocatalyst capable of catalysing such conversion and 5-FVA is thereafter converted into 6-ACA in the presence of an aminotransferase, amino acid dehydrogenase, or other biocatalyst capable of catalysing such conversion. Decarboxylases suitable for these reactions may in particular be selected from the group of decarboxylases mentioned above, when describing the biocatalytic conversion of AKP into 5-FVA. A suitable aminotransferase or amino acid dehydrogenase for the conversion of 5-FVA may in particular be selected from those mentioned above, when describing the biocatalytic conversion of 5-FVA to 6-ACA.

[0114] In a specific embodiment, AKP is biocatalytically converted into AAP in the presence of an aminotransferase, amino acid dehydrogenase, or other biocatalyst capable of catalysing such conversion and AAP is thereafter converted into 6-ACA in the presence of a decarboxylase. Enzymes suitable for these reactions may in particular be selected from the group of aminotransferases, amino acid dehydrogenases, and decarboxylases which have been described above when describing the biocatalytic conversion of AKP into AAP and the biocatalytic conversion of AAP into 6-ACA respectively.

[0115] In another embodiment of the invention, 6-ACA—prepared from AKP made in a method according to the invention—is converted into diaminohexane. This may be accomplished by reducing the acid group to form an aldehyde group, and transaminating the thus formed aldehyde group, thereby providing an aminogroup, yielding diaminohexane. This may be accomplished chemically or biocatalytically. In a preferred method of the invention, the preparation comprises a biocatalytic reaction in the presence of a biocatalyst capable of catalysing the reduction of the acid to form an aldehyde group and/or a biocatalytic reaction in the presence of a biocatalyst capable of catalysing said transamination, in the presence of an amino donor, e.g. an amino donor as described elsewhere herein.

[0116] A biocatalyst capable of catalysing the reduction of the acid group to form an aldehyde group may in particular comprise an enzyme selected from the group of oxidoreductases (EC 1.2.1), preferably from the group of aldehyde dehydrogenases (EC 1.2.1.3, EC 1.2.1.4 and EC 1.2.1.5), acetaldehyde dehydrogenase (acetylating) (EC 1,2,1,10); aspartate-semialdehyde dehydrogenase (EC 1.2.1.11); malonate-semialdehyde dehydrogenase (EC 1.2.1.15); and succinate-semialdehyde dehydrogenase (EC 1.2.1.16 and EC 1.2.1.24).

[0117] The oxidoreductase may in principle be obtained or derived from any organism. The organism may be prokaryotic or eukaryotic. In particular the organism can be selected from bacteria, archaea, yeasts, fungi, protists, plants and animals (including human).

[0118] In an embodiment the oxidoreductase, in particular the aldehyde dehydrogenase, is obtained or derived from a bacterium selected from the group of Acinetobacter (in particular Acinetobacter baumanii and Acinetobacter sp. NCIMB9871), Azospirillum (in particular Azospirillum brasilense) Ralstonia, Bordetella, Burkholderia, Methylobacterium, Xanthobacter, Sinorhizobium, Rhizobium, Nitrobacter, Brucella (in particular B. melitensis), Pseudomonas, Agrobacterium (in particular Agrobacterium tumefaciens), Bacillus, Listeria, Alcaligenes, Corynebacterium, Escherichia, and Flavobacterium.

[0119] In an embodiment, the oxidoreductase, in particular the aldehyde dehydrogenase, is obtained or derived from an organism selected from the group of yeasts and fungi, in particular from the group of Aspergillus (in particular A. niger and A. nidulans) and Penicillium (in particular P. chrysogenum).

[0120] In an embodiment, the oxidoreductase, in particular the aldehyde dehydrogenase, is obtained or derived from a plant, in particular Arabidopsis, more in particular A. thaliana.

[0121] A biocatalyst capable of catalysing the transamination reaction in the conversion to diaminohexane may in particular comprise an enzyme selected from the group of aminotransferases (E.C. 2.6.1), e.g. found in an organism as described elsewhere herein.

[0122] Reaction conditions in a method of the invention may be chosen depending upon known conditions for the biocatalyst, in particular the enzyme, the information disclosed herein and optionally some routine experimentation.

[0123] In principle, the pH of the reaction medium used may be chosen within wide limits, as long as the biocatalyst is active under the pH conditions. Alkaline, neutral or acidic conditions may be used, depending on the biocatalyst and other factors. In case the method includes the use of a micro-organism, e.g. for expressing an enzyme catalysing a method of the invention, the pH is selected such that the micro-organism is capable of performing its intended function or functions. The pH may in particular be chosen within the range of four pH units below neutral pH and two pH units above neutral pH, i.e. between pH 3 and pH 9 in case of an essentially aqueous system at 25° C. A system is considered aqueous if water is the only solvent or the predominant solvent (>50 wt. %, in particular >90 wt. %, based on total liquids), wherein e.g. a minor amount (<50 wt. %, in particular <10 wt. %, based on total liquids) of alcohol or another solvent may be dissolved (e.g. as a carbon source) in such a concentration that micro-organisms which may be present remain active. In particular in case a yeast and/or a fungus is used, acidic conditions may be preferred, in particular the pH may be in the range of pH 3 to pH 8, based on an essentially aqueous system at 25° C. If desired, the pH may be adjusted using an acid and/or a base or buffered with a suitable combination of an acid and a base.

[0124] In principle, the incubation conditions can be chosen within wide limits as long as the biocatalyst shows sufficient activity and/or growth. This includes aerobic, micro-aerobic, oxygen limited and anaerobic conditions.

[0125] Anaerobic conditions are herein defined as conditions without any oxygen or in which substantially no oxygen is consumed by the biocatalyst, in particular a micro-organism, and usually corresponds to an oxygen consumption of less than 5 mmol/l.h, in particular to an oxygen consumption of less than 2.5 mmol/l.h, or less than 1 mmol/l.h.

[0126] Aerobic conditions are conditions in which a sufficient level of oxygen for unrestricted growth is dissolved in the medium, able to support a rate of oxygen consumption of at least 10 mmol/l.h, more preferably more than 20 mmol/l.h, even more preferably more than 50 mmol/l.h, and most preferably more than 100 mmol/l.h.

[0127] Oxygen-limited conditions are defined as conditions in which the oxygen consumption is limited by the oxygen transfer from the gas to the liquid. The lower limit for oxygen-limited conditions is determined by the upper limit for anaerobic conditions, i.e. usually at least 1 mmol/l.h, and in particular at least 2.5 mmol/l.h, or at least 5 mmol/l.h. The upper limit for oxygen-limited conditions is determined by the lower limit for aerobic conditions, i.e. less than 100 mmol/l.h, less than 50 mmol/l.h, less than 20 mmol/l.h, or less than to 10 mmol/l.h.

[0128] Whether conditions are aerobic, anaerobic or oxygen limited is dependent on the conditions under which the method is carried out, in particular by the amount and composition of ingoing gas flow, the actual mixing/mass transfer properties of the equipment used, the type of micro-organism used and the micro-organism density.

[0129] In a preferred method of the invention, at least the preparation of AKP is carried out under fermentative conditions.

[0130] In principle, the temperature used is not critical, as long as the biocatalyst, in particular the enzyme, shows substantial activity. Generally, the temperature may be at least 0° C., in particular at least 15° C., more in particular at least 20° C. A desired maximum temperature depends upon the biocatalyst. In general such maximum temperature is known in the art, e.g. indicated in a product data sheet in case of a commercially available biocatalyst, or can be determined routinely based on common general knowledge and the information disclosed herein. The temperature is usually 90° C. or less, preferably 70° C. or less, in particular 50° C. or less, more in particular or 40° C. or less.

[0131] In particular if a biocatalytic reaction is performed outside a host organism, a reaction medium comprising an organic solvent may be used in a high concentration (e.g. more than 50%, or more than 90 wt. %), in case an enzyme is used that retains sufficient activity in such a medium.

[0132] A compound prepared in a method of the invention can be recovered from the medium in which it has been prepared. Recovery conditions may be chosen depending upon known conditions for recovery the specific compound, the information disclosed herein and optionally some routine experimentation.

[0133] A heterologous cell comprising one or more enzymes for catalysing a reaction step in a method of the invention can be constructed using molecular biological techniques, which are known in the art per se. For instance, such techniques can be used to provide a vector which comprises one or more genes encoding one or more of said biocatalysts. A vector comprising one or more of such genes can comprise one or more regulatory elements, e.g. one or more promoters, which may be operably linked to a gene encoding an biocatalyst.

[0134] As used herein, the term “operably linked” refers to a linkage of polynucleotide elements (or coding sequences or nucleic acid sequence) in a functional relationship. A nucleic acid sequence is “operably linked” when it is placed into a functional relationship with another nucleic acid sequence. For instance, a promoter or enhancer is operably linked to a coding sequence if it affects the transcription of the coding sequence.

[0135] As used herein, the term “promoter” refers to a nucleic acid fragment that functions to control the transcription of one or more genes, located upstream with respect to the direction of transcription of the transcription initiation site of the gene, and is structurally identified by the presence of a binding site for DNA-dependent RNA polym erase, transcription initiation sites and any other DNA sequences, including, but not limited to transcription factor binding sites, repressor and activator protein binding sites, and any other sequences of nucleotides known to one of skilled in the art to act directly or indirectly to regulate the amount of transcription from the promoter. A “constitutive” promoter is a promoter that is active under most environmental and developmental conditions. An “inducible” promoter is a promoter that is active under environmental or developmental regulation. The term “homologous” when used to indicate the relation between a given (recombinant) nucleic acid or polypeptide molecule and a given host organism or host cell, is understood to mean that in nature the nucleic acid or polypeptide molecule is produced by a host cell or organisms of the same species, preferably of the same variety or strain.

[0136] The promoter that could be used to achieve the expression of the nucleotide sequences coding for an enzyme for use in a method of the invention, in particular an aminotransferase, an amino acid dehydrogenase or a decarboxylase, such as described herein above may be native to the nucleotide sequence coding for the enzyme to be expressed, or may be heterologous to the nucleotide sequence (coding sequence) to which it is operably linked. Preferably, the promoter is homologous, i.e. endogenous to the host cell.

[0137] If a heterologous promoter (to the nucleotide sequence encoding for the enzyme of interest) is used, the heterologous promoter is preferably capable of producing a higher steady state level of the transcript comprising the coding sequence (or is capable of producing more transcript molecules, i.e. mRNA molecules, per unit of time) than is the promoter that is native to the coding sequence. Suitable promoters in this context include both constitutive and inducible natural promoters as well as engineered promoters, which are well known to the person skilled in the art.

[0138] A “strong constitutive promoter” is one which causes mRNAs to be initiated at high frequency compared to a native host cell. Examples of such strong constitutive promoters in Gram-positive micro-organisms include SP01-26, SP01-15, veg, pyc (pyruvate carboxylase promoter), and amyE.

[0139] Examples of inducible promoters in Gram-positive micro-organisms include, the IPTG inducible Pspac promoter, the xylose inducible PxyIA promoter.

[0140] Examples of constitutive and inducible promoters in Gram-negative microorganisms include, but are not limited to, tac, tet, trp-tet, lpp, lac,lpp-lac, lacIq, T7, T5, T3, gal, trc, ara (P_{BAD}), SP6, λ-P_{R} and λ-P_{L}.

[0141] Promoters for (filamentous) fungal cells are known in the art and can be, for example, the glucose-6-phosphate dehydrogenase gpdA promoters, protease promoters such as pepA, pepB, pepC, the glucoamylase glaA promoters, amylase amyA, amyB promoters, the catalase catR or catA promoters, glucose oxidase goxC promoter, beta-galactosidase lacA promoter, alpha-glucosidase aglA promoter, translation elongation factor tefA promoter, xylanase promoters such as xlnA, xlnB, xlnC, xlnD, cellulase promoters such as eglA, egIB, cbhA, promoters of transcriptional regulators such as areA, creA, xlnR, pacC, prtT, etc or any other, and can be found among others at the NCBI website (http://www.ncbi.nlm.nih.gov/entrez/

[0142] The invention also relates to a novel heterologous cell which may provide one or more biocatalysts capable of catalysing at least one reaction step in the preparation of AKP, and optionally in the preparation of a further compound from AKP, such as 5-FVA, AAP, 6-ACA, diaminohexane or caprolactam. The invention also relates to a novel vector comprising one or more genes encoding for one or more enzymes capable of catalysing at least one reaction step in the preparation of AKP, and optionally in the preparation of a further compound from AKP, such as 5-FVA, AAP, 6-ACA, diaminohexane or caprolactam. One or more suitable genes may in particular be selected amongst genes encoding an enzyme as mentioned herein above. In particular, at least one of such genes is heterologous to the host organism.

[0143] In a particularly advantageous embodiment the heterologous cell or the vector comprises an AksD, an AksE, an AksF and an NifV gene. In a further particularly advantageous embodiment the heterologous cell additionally comprises an AksA gene. Preferred AksA, AksD, AksE and AksF genes are from M. jannashii, from S. cerevisiae, from M. Maripaludis, from Methanosarcina acetivorans, from Methanospirillum hungatei or from E. coli.

[0144] The NifV gene is preferably from Azotobacter vinelandii. In a particularly preferred embodiment, the NifV gene comprises a sequence represented by SEQ ID NO: 149, or a functional analogue thereof.

[0145] Regarding the genes selected from the group of AksA, AksD, AksE and AksF genes, preferably, the genome of a cell (used) according to the invention comprises at least one nucleic acid sequence according to any of the sequences selected from the group of SEQ ID NO's 145, 146, 147, 148; SEQ ID NO's 167, 168, 169, 170, 171, 172, 173, 174; SEQ ID NO's 177, 178, 179, 180, 181, 182, 183, 184; SEQ ID NO's 224, 226, 236, 238, 248, 250, 260, 262; SEQ ID NO's 227, 229, 239, 241, 251, 253, 263, 265; SEQ ID NO's; 194, 196, 206, 208, 221, 223, 281, 283; SEQ ID NO's; 188, 190, 200, 202, 215, 217, 272, 274 and functional analogues thereof. In a specific embodiment, the cell comprises an an AksA, an AksD, an AksE and an AksF gene selected from the group of sequences. In a further specific embodiment, the cell comprises an NifV gene comprising a sequence represented by SEQ ID NO: 149 or a functional analogue thereof, an AksD, an AksE and an AksF gene selected from the group of sequences.

[0146] In a particularly preferred embodiment, one, two three or each of these genes selected from the group of AksA, AksD, AksE and AksF genes comprise a sequence selected from the sequences represented by SEQ ID NO: 145, 146, 147, 148 respectively (AksA, D, E and F respectively) and functional analogous thereof. In a further particularly preferred embodiment, one, two three or each of these genes comprise a sequence represented by respectively SEQ ID NO: 167, 168, 169, 170 respectively (AksA, D, E and F respectively) and functional analogous thereof. In a particularly preferred embodiment, one, two three or each of these genes selected from the group of AksA, AksD, AksE and AksF genes comprise a sequence selected from the sequences represented by represented by SEQ ID NO: 260, 224, 236, 248, respectively (AksA, D, E and F respectively) and functional analogous thereof.

[0147] In a particularly preferred embodiment, one, two three or each of these genes selected from the group of AksA, AksD, AksE and AksF genes comprise a sequence selected from the sequences represented by represented by SEQ ID NO: 262, 226, 238, 250, respectively (AksA, D, E and F respectively) and functional analogous thereof.

[0148] In a particularly preferred embodiment, one, two three or each of these genes selected from the group of AksA, AksD, AksE and AksF genes comprise a sequence selected from the sequences represented by represented by SEQ ID NO: 263, 227, 239, 251, respectively (AksA, D, E and F respectively) and functional analogous thereof.

[0149] In a particularly preferred embodiment, one, two three or each of these genes comprise a sequence selected from the sequences represented by represented by SEQ ID NO: 265, 229, 241, 253, respectively (AksA, D, E and F respectively) and functional analogous thereof.

[0150] In a particularly preferred embodiment, one, two, three or each of these genes selected from the group of AksA, AksD, AksE and AksF genes comprise a sequence selected from the sequences represented by represented by SEQ ID NO: 281, 194, 206, 221 respectively (AksA, D, E and F respectively) and functional analogous thereof.

[0151] In a particularly preferred embodiment, one, two three or each of these genes selected from the group of AksA, AksD, AksE and AksF genes comprise a sequence selected from the sequences represented by represented by SEQ ID NO: 283, 196, 208, 223, respectively (AksA, D, E and F respectively) and functional analogous thereof.

[0152] In a particularly preferred embodiment, one, two three or each of these genes selected from the group of AksA, AksD, AksE and AksF genes comprise a sequence selected from the sequences represented by represented by SEQ ID NO: 272, 188, 200, 215 respectively (AksA, D, E and F respectively) and functional analogous thereof.

[0153] In a particularly preferred embodiment, one, two three or each of these genes selected from the group of AksA, AksD, AksE and AksF genes comprise a sequence selected from the sequences represented by represented by SEQ ID NO: 274, 190, 202, 217 respectively (AksA, D, E and F respectively) and functional analogous thereof.

[0154] In yet a further particularly preferred embodiment, one, two three or each of these genes selected from the group of AksA, AksD, AksE and AksF genes comprise a sequence selected from the sequences represented by respectively SEQ ID NO: 161, 162, 163, 164, 165, 166, 167, 168, 169, 170, 171, 172, 173, 174 respectively (AksA, D, E and F respectively) and functional analogous thereof. In yet a further particularly preferred embodiment, one, two three or each of these genes comprise a sequence selected from the sequences represented by respectively SEQ ID NO: 177, 178, 179, 180 respectively (AksA, D, E and F respectively) and functional analogous thereof.

[0155] In yet a further particularly preferred embodiment, one, two three or each of these genes selected from the group of AksA, AksD, AksE and AksF genes comprise a sequence selected from the sequences represented by respectively SEQ ID NO: 260, 224, 236, 248, respectively (AksA, D, E and F respectively) and functional analogous thereof.

[0156] In yet a further particularly preferred embodiment, one, two three or each of these genes selected from the group of AksA, AksD, AksE and AksF genes comprise a sequence selected from the sequences represented by respectively SEQ ID NO: 263, 227, 239, 251, respectively (AksA, D, E and F respectively) and functional analogous thereof.

[0157] In yet a further particularly preferred embodiment, one, two three or each of these genes selected from the group of AksA, AksD, AksE and AksF genes comprise a sequence selected from the sequences represented by respectively SEQ ID NO: 281, 194, 206, 221, respectively (AksA, D, E and F respectively) and functional analogous thereof.

[0158] In yet a further particularly preferred embodiment, one, two three or each of these genes comprise a sequence selected from the sequences represented by respectively SEQ ID NO: 272, 188, 200, 215, respectively (AksA, D, E and F respectively) and functional analogous thereof.

[0159] In a particularly preferred embodiment, the genome of the cell comprises a nucleic acid sequence represented by sequence ID145, or a functional analogue thereof, a nucleic acid sequence represented by sequence ID146, or a functional analogue thereof, a nucleic acid sequence represented by sequence ID147, or a functional analogue thereof, a nucleic acid sequence represented by sequence ID148, or a functional analogue thereof, and a nucleic acid sequence represented by sequence ID149, or a functional analogue thereof.

[0160] In a particularly preferred embodiment, the genome of the cell comprises a nucleic acid sequence represented by sequence ID146, or a functional analogue thereof, a nucleic acid sequence represented by sequence ID147, or a functional analogue thereof, a nucleic acid sequence represented by sequence ID148, or a functional analogue thereof, and a nucleic acid sequence represented by sequence ID149, or a functional analogue thereof.

[0161] In a particularly preferred embodiment, the genome of the cell comprises a nucleic acid sequence represented by sequence ID172, or a functional analogue thereof, a nucleic acid sequence represented by sequence ID173, or a functional analogue thereof, a nucleic acid sequence represented by sequence I D174, or a functional analogue thereof, and a nucleic acid sequence represented by sequence ID149, or a functional analogue thereof.

[0162] In a particularly preferred embodiment, the genome of the cell comprises a nucleic acid sequence represented by sequence ID 224, or a functional analogue thereof, a nucleic acid sequence represented by sequence ID 236, or a functional analogue thereof, a nucleic acid sequence represented by sequence ID 248, or a functional analogue thereof, and a nucleic acid sequence represented by sequence ID 149, or a functional analogue thereof.

[0163] In a particularly preferred embodiment, the genome of the cell comprises a nucleic acid sequence represented by sequence ID 227, or a functional analogue thereof, a nucleic acid sequence represented by sequence ID 239, or a functional analogue thereof, a nucleic acid sequence represented by sequence ID 251, or a functional analogue thereof, and a nucleic acid sequence represented by sequence ID 149, or a functional analogue thereof.

[0164] In a particularly preferred embodiment, the genome of the cell comprises a nucleic acid sequence represented by sequence ID194, or a functional analogue thereof, a nucleic acid sequence represented by sequence ID206, or a functional analogue thereof, a nucleic acid sequence represented by sequence ID221, or a functional analogue thereof, and a nucleic acid sequence represented by sequence ID 149, or a functional analogue thereof.

[0165] In a particularly preferred embodiment, the genome of the cell comprises a nucleic acid sequence represented by sequence ID188, or a functional analogue thereof, a nucleic acid sequence represented by sequence ID200, or a functional analogue thereof, a nucleic acid sequence represented by sequence ID215, or a functional analogue thereof, and a nucleic acid sequence represented by sequence ID 149, or a functional analogue thereof.

[0166] In a particularly preferred embodiment, the genome of the cell comprises a nucleic acid sequence represented by sequence ID177, or a functional analogue thereof, a nucleic acid sequence represented by sequence ID178, or a functional analogue thereof, a nucleic acid sequence represented by sequence ID179, or a functional analogue thereof, a nucleic acid sequence represented by sequence ID180, or a functional analogue thereof, and a nucleic acid sequence represented by sequence ID149, or a functional analogue thereof.

[0167] In a particularly preferred embodiment, the genome of the cell comprises a nucleic acid sequence represented by sequence ID224, or a functional analogue thereof, a nucleic acid sequence represented by sequence ID236, or a functional analogue thereof, a nucleic acid sequence represented by sequence ID248, or a functional analogue thereof, a nucleic acid sequence represented by sequence ID260, or a functional analogue thereof, and a nucleic acid sequence represented by sequence ID149, or a functional analogue thereof.

[0168] In a particularly preferred embodiment, the genome of the cell comprises a nucleic acid sequence represented by sequence ID227, or a functional analogue thereof, a nucleic acid sequence represented by sequence ID239, or a functional analogue thereof, a nucleic acid sequence represented by sequence ID251, or a functional analogue thereof, a nucleic acid sequence represented by sequence ID263, or a functional analogue thereof, and a nucleic acid sequence represented by sequence ID149, or a functional analogue thereof.

[0169] In a particularly preferred embodiment, the genome of the cell comprises a nucleic acid sequence represented by sequence ID194, or a functional analogue thereof, a nucleic acid sequence represented by sequence ID206, or a functional analogue thereof, a nucleic acid sequence represented by sequence ID221, or a functional analogue thereof, a nucleic acid sequence represented by sequence ID281, or a functional analogue thereof, and a nucleic acid sequence represented by sequence ID149, or a functional analogue thereof.

[0170] In a particularly preferred embodiment, the genome of the cell comprises a nucleic acid sequence represented by sequence ID188, or a functional analogue thereof, a nucleic acid sequence represented by sequence ID200, or a functional analogue thereof, a nucleic acid sequence represented by sequence ID215, or a functional analogue thereof, a nucleic acid sequence represented by sequence ID272, or a functional analogue thereof, and a nucleic acid sequence represented by sequence ID149, or a functional analogue thereof.

[0171] Good results have been achieved with a E. coli host cell of which the genome comprises heterologous nucleic acid sequences, represented by SEQ ID No's: 149, 167, 168, 169 and 170.

[0172] Good results have been achieved with a E. coli host cell of which the genome comprises heterologous nucleic acid sequences, represented by SEQ ID No's: 149, 168, 169 and 170.

[0173] Good results have been achieved with a S. cerevisiae host cell of which the genome comprises heterologous nucleic acid sequences, represented by sequence ID's 149, 172, 173 and 174.

[0174] Good results have been achieved with a E. coli host cell of which the genome comprises heterologous nucleic acid sequences, represented by SEQ ID No's: 149, 177, 178, 179, 180.

[0175] Good results have been achieved with a E. coli host cell of which the genome comprises heterologous nucleic acid sequences, represented by SEQ ID No's: 149, 224, 236, 248.

[0176] Good results have been achieved with a E. coli host cell of which the genome comprises heterologous nucleic acid sequences, represented by SEQ ID No's: 149, 227, 239, 251.

[0177] Good results have been achieved with a E. coli host cell of which the genome comprises heterologous nucleic acid sequences, represented by SEQ ID No's: 149, 194, 206, 221.

[0178] Good results have been achieved with a E. coli host cell of which the genome comprises heterologous nucleic acid sequences, represented by SEQ ID No's: 149, 188, 200, 251.

[0179] The heterologous cell may in particular be a cell as mentioned above when describing the biocatalyst.

[0180] In particular, a heterologous cell according to the invention, comprises one or more heterologous nucleic acid sequences (which may be part of one or more vectors) encoding one or more heterologous enzymes capable of catalysing at least one reaction step in the preparation of α-ketopimelic acid from α-ketoglutaric acid or in the conversion of AKP to AAP, 6-ACA, 5-FVA, caprolactam, or diaminohexane.

[0181] In a specific embodiment, the cell comprises one or more nucleic acid sequences, which may be homologous or heterologous, encoding an enzyme system capable of catalysing the conversion of alpha-ketoglutaric acid into alpha-ketoadipic acid, wherein said enzyme system forms part of the AAA biosynthetic pathway for lysine biosynthesis, such as described in more detail above.

[0182] The heterologous cell is preferably free of aminotransferase activity capable of catalysing the conversion of -alpha-ketoadipate into alpha-aminoadipate. If naturally present in the cell, the activity may be removed, decreased or modified by inactivation, modification or deletion of the gene or genes encoding such enzymes in the cells DNA. This activity may originate from one or more biocatalysts. These may also be modified e.g. by molecular evolution or rational design to not possess any undesired activity any more but to retain any desired activity (e.g. any activity in the context of the invention or an activity required for metabolism of the host cell).

[0183] The heterologous cell is preferably free of any enzyme(s) which can degrade or convert AKP, 5-FVA, AAP, 6-ACA, caprolactam or diaminohexane into any undesired side product. If any such activity e.g. as part of a caprolactam degradation pathway is identified this activity can be removed, decreased or modified as described herein above.

[0184] Preferably, the cell comprises one or more heterologous nucleic acid sequences encoding one or more enzymes catalysing the C₁-elongation of alpha-ketoglutaric acid into alpha-ketoadipic acid and/or C₁-elongation of alpha-ketoadipic acid into alpha-ketopimelic acid. Suitable nucleic acid sequences may in particular be selected amongst nucleic acid sequences encoding an Aks enzyme or an homologue thereof, such as identified above.

[0185] In particular in case the cell is intended to be used for preparing AKP, which in turn is to be converted into a further product, such as 5-FVA or AAP, which in turn may be further converted to 6-ACA, caprolactam or diaminohexane, it is preferred that the heterologous cell comprises a nucleic acid sequence encoding an enzyme catalysing such conversion. This may be advantageous, for instance in that at least some enzymes catalysing C₁-elongation, which may be active in the cell may be capable of catalysing the undesired elongation of AKP. By expressing an enzyme capable of catalysing the conversion of AKP into a desired product, such as 5-FVA or AAP, such as a decarboxylase or an aminotransferase, in the cell, it is contemplated that such undesired elongation may be reduced or substantially avoided, also if the enzyme or enzymes catalysing the elongation are in principle capable of using AKP as a substrate.

[0186] It is noted that some of the enzymes involved in C₁-elongations e.g. in M. jannashii or A. vinelandii have relaxed substrate specificity and are able to convert substrates of different carbon length. It is known for many enzymes that they have a relaxed substrate specificity which allows them to convert unnatural substrates. In order to improve the efficiency of a heterologous cell (used in a method) according to the invention, it is particularly preferred to provide an enzyme system capable of catalysing a reaction step in the preparation of AKP from AKG that shows a high catalytic activity towards the elongation of AKG into AKA and/or the elongation of AKA into AKP, yet a low catalytic activity towards the further elongation of AKP. (A nucleic acid sequence coding for) one or more enzymes capable of catalysing a reaction step in the preparation of AKP from AKG may be modified by a technique such as described above in order to increase the reaction specificity with respect to elongation of AKG and/or AKA, and/or (a nucleic acid sequence coding for) such enzyme may be modified such that the binding affinity for AKP (as a substrate) is reduced such that the catalytic activity with respect to the elongation of AKP is reduced.

[0187] Such modification may involve molecular evolution to create diversity followed by screening for desired mutants and/or rational engineering of substrate binding pockets. Techniques to modify the substrate specificity of an enzyme used in a method of the invention may be based on those described in the art. In particular, an AksA enzyme or homologue thereof, capable of catalysing “reaction a” of the C₁-elongation may be evolved such that the catalytic activity with respect to catalysing the elongation of AKP to alpha-ketosuberate is reduced, relatively to the catalytic activity with respect to catalysing the elongation of AKA to AKP and/or AKG to AKA. Preferably, such enzyme shows no substantial catalytic activity with respect to catalysing the elongation of AKP to alpha-ketosuberate. It is thought that in particular the enzyme catalysing “reaction a” controls the maximum chain length obtainable by the C₁-elongation, unless of course the AKP is intended to serve as a substrate in the preparation of alpha-ketosuberate.

[0188] For instance, rational engineering employing structural and sequence information to design specific mutations has been utilised to modify the substrate specificity of the acyl transferase domain 4 from the erythromycin polyketide synthase to accept alternative acyl donors. It has been shown that modifying the proposed substrate binding site resulted in a modified binding pocket able to accommodate alternative substrates resulting in a different product ratio (Reeves, C. D.; Murli, S.; Ashley, G. W.; Piagentini, M.; Hutchinson, C. R.; McDaniel, R. Biochemistry 2001, 40(51), 15464-15470). Both rational design and molecular evolution approaches have been used to alter the substrate specificity of the biocatalyst BM3 resulting in a large number of mutants capable of oxidizing a large variety of different alkenes, cycloalkenes, arenes and heteroarenes instead or in addition to the natural substrate of medium chain fatty acids (e.g. myristic acid) (Peters, M. W.; Meinhold, P.; Glieder, A.; Arnold, F. H. Journal of the American Chemical Society 2003, 125(44), 13442-13450; Appel, D.; Lutz-Wahl, S.; Fischer, P.; Schwaneberg, U.; Schmid, R. D. Journal of Biotechnology 2001, 88(2), 167-171 and references therein).

[0189] In an embodiment, the heterologous cell comprises a heterologous nucleic acid sequence encoding a homocitrate synthase that has been evolved from a homocitrate synthase, which accepted alpha-ketoglutarate as a substrate but for which alpha-ketoadipate was not a suitable substrate, to also accept alpha-ketoadipate as a substrate. Such enzyme may in particular be a fungal enzyme or bacterial enzyme involved in lysine biosynthesis via the AAA pathway e.g. from Penicillium, Cephalosporium, Ustilago, Cephalosporium, Paelicomyces, Trichophytum, Phanerochaete, Emericella, Aspergillus, Yarrowoa, Schizosaccharomyces, Pichia, Hansenula, Klyuveromyces, Candida, Saccharomyces, Thermus, or Deinococcus, or from nitrogen fixing bacteria, e.g. Azotobacter, Frankia, Synecchocystis, Anabaena, Microcyctis, Rhizobium, Bradyrhizobium, Klebsiella, or Pseudomonas. In particular an enzyme such as NifV from Azotobacter vinelandii may be used, which was demonstrated to have initial activity on AKA (Zheng, L.; White, R. H.; Dean, D. R. The Journal of Bacteriology 1997, 179(18), 5963-5966). In Sequence ID 149 a gene encoding said enzyme is shown.

[0190] The heterologous cell may in particular comprise a nucleic acid sequence encoding an Aks enzyme or homologue thereof, such as identified above, more in particular the cell may at least comprise a nucleic acid sequence encoding an Aks enzyme or a homologue thereof, preferably a nucleic acid sequence encoding an enzyme may be used represented by any of the sequence ID's 4, 5, 6, 7, 8, 9, 10, 11, 12, 13 44, 45, 46, 47, 48, 49, 50, 51, 52, 53, 69, 70, 71, 72, 73, 74, 75, 76, 77, 261, 264, 267, 270, 273, 276, 279, 282 or a homologue thereof.

[0191] In a further preferred embodiment the cell comprises at least one nucleic acid sequence encoding an enzyme represented by any of the sequence ID's 14, 15, 16, 17, 18, 19, 20, 21, 22, 23, 54, 55, 56, 57, 58, 59, 60, 61, 186, 189, 192, 195, 225, 228, 231, 234 or a homologue thereof.

[0192] In a further preferred embodiment the cell comprises at least one nucleic acid sequence encoding an enzyme represented by any of the sequence ID's 24, 24, 25, 26, 27, 28, 29, 30, 31, 32, 33, 198, 201, 204, 207, 237, 240, 243, 246 or a homologue thereof.

[0193] In a further preferred embodiment the cell comprises at least one nucleic acid sequence encoding an enzyme represented by any of the sequence ID's 34, 35, 36, 37, 38, 39, 40, 41, 42, 43, 62, 63, 64, 65, 66, 67, 210, 213, 216, 219, 222, 249, 252, 255, 258 or a homologue thereof.

[0194] In an embodiment, the heterologous organism is based on a host cell that has the AAA pathway for lysine biosynthesis, wherein a homocitrate synthase, capable of catalysing “reaction a” in the C₁-elongation (such as AksA or a homologue thereof) may be heterologously expressed. Such homocitrate synthase preferably is capable of selectively catalysing a reaction step in the elongation of AKG and/or AKA (reaction a), without substantially catalysing the elongation of AKP. In such a case it may be beneficial to delete any endogenous homo citrate synthase, in particular if it is capable of catalysing “reaction a” in the elongation reaction of AKP. Such a host cell may then effectively contain one or more homo citrate synthases functionally active in the C₁-elongation of AKG to AKA and/or AKA to AKP. Further reactions to realise the elongation of AKG and/or AKA may then be catalysed by endogenous enzymes, such as those enzymes involved in the aminoadipate pathway.

[0195] In an embodiment, the heterologous cell comprises (a recombinant vector comprising) a nucleic acid sequence encoding an enzyme with alpha-ketopimelic acid aminotransferase activity and/or a nucleic acid sequence encoding an enzyme with alpha-aminopimelic acid decarboxylase activity.

[0196] In a preferred embodiment, a heterologous cell according to the invention comprises a nucleic acid sequence encoding an enzyme with AKP decarboxylase activity and/or a nucleic acid sequence encoding an enzyme with 5-FVA aminotransferase activity. In a preferred embodiment, a heterologous cell according to the invention comprises a nucleic acid sequence encoding an enzyme with alpha-aminopimelate 2-dehydrogenase or AKP aminotransferase activity and/or a nucleic acid sequence encoding an enzyme with alpha-aminopimelate decarboxylase activity.

[0197] In a preferred embodiment, a heterologous cell according to the invention comprises a nucleic acid sequence encoding an enzyme with 6-aminocaproic acid 6-dehydrogenase activity and optionally a nucleic acid sequence encoding an enzyme with alpha-ketopimelic acid decarboxylase activity.

[0198] The invention will now be illustrated by the following examples.

### EXAMPLES

### Example 1

### General Methods

[0199] Molecular and Genetic Techniques

[0200] Standard genetic and molecular biology techniques are generally known in the art and have been previously described (Maniatis et al. 1982 “Molecular cloning: a laboratory manual”. Cold Spring Harbor Laboratory, Cold Spring Harbor, N.Y.; Miller 1972 “Experiments in molecular genetics”, Cold Spring Harbor Laboratory, Cold Spring Harbor; Sambrook and Russell 2001 “Molecular cloning: a laboratory manual” (3rd edition), Cold Spring Harbor Laboratory, Cold Spring Harbor Laboratory Press; F. Ausubel et al, eds., “Current protocols in molecular biology”, Green Publishing and Wiley Interscience, New York 1987).

[0201] Plasmids and Strains

[0202] pMS470 (Balzer, D.; Ziegelin, G.; Pansegrau, W.; Kruft, V.; Lanka, E. Nucleic Acids Research 1992, 20(8), 1851-1858.) and pBBR1MCS (Kovach M E, Phillips R W, Elzer P H, Roop R M 2nd, Peterson K M. Biotechniques. 1994 May; 16(5):800-2. pBBR1MCS: a broad-host-range cloning vector) have been described previously. E. coli strains TOP10 and DH10B (Invitrogen, Carlsbad, Calif., USA) were used for all cloning procedures. E. coli strains BL21 A1 (Invitrogen, Carlsbad, Calif., USA) and BL21 (Novagen (EMD/Merck), Nottingham, UK) were used for protein expression.

[0203] pRS414, pRS415 and pRS416 (Sikorski, R. S, and Hieter, P. A system of shuttle vectors and yeast host strains designed for efficient manipulation of DNA in Saccharomyces cerevisiae Genetics 122 (1), 19-27 (1989); Christianson, T. W., Sikorski, R. S., Dante, M., Shero, J. H. and Hieter, P. Multifunctional yeast high-copy-number shuttle vectors. Gene 110 (1), 119-122 (1992)) were used for expression in S. cerevisiae. S. cerevisiae strains CEN.PK 113-6B (ura3, trp1, leu2, MATa), CEN.PK 113-5D (ura3, MATa), CEN.PK 102-3A (ura3, leu2, MATa) and CEN.PK 113-9D (ura3, trp1, MATa) were used for protein expression.

[0204] Media

[0205] 2×TY medium (16 g/l tryptopeptone, 10 g/l yeast extract, 5 g/l NaCl) was used for growth of E. colit. Antibiotics (100 μg/ml ampicillin, 50-100 μg/ml neomycin) were supplemented to maintain plasmids in E. colit. For induction of gene expression in E. colit arabinose (for BL21-Al derivatives) and IPTG (for pMS470, pBBR1MCS derivatives) were used at 0.02% (arabinose) and 0.2 mM (IPTG) final concentrations. AKP production by E. colit was done in M9 minimal medium (12.8 g/L Na₂HPO₄.7H₂O, 3 g/L KH₂PO₄, 0.5 g/L NaCl, 1 g/L NH₄Cl, 2 mM MgSO₄, 0.1 mM CaCl₂) with glucose (1-4%) or glycerol (1-4%) as carbon source, as further specified below.

[0206] Verduyn medium with 4% galactose was used for growth of S. cerevisiae.

[0207] Identification of Plasmids

[0208] Plasmids carrying the different genes were identified by genetic, biochemical, and/or phenotypic means generally known in the art, such as resistance of transformants to antibiotics, PCR diagnostic analysis of transformant or purification of plasmid DNA, restriction analysis of the purified plasmid DNA or DNA sequence analysis. Integrity of all new constructs described was confirmed by restriction digest and, if PCR steps were involved, additionally by sequencing.

[0209] UPLC-MS/MS Analysis Method for the Determination of α-Keto Acids, 6-ACA, AAP, 5-FVA and Homo₍ₙ₎Citrate

[0210] A Waters HSS T3 column 1.8 μm, 100 mm*2.1 mm was used for the separation of alpha-keto acids, 6-ACA, AAP, 5-FVA and homo(n)citrate with gradient elution as depicted in Table 1. Eluens A consists of LC/MS grade water, containing 0.1% formic acid, and eluens B consists of acetonitrile, containing 0.1% formic acid. The flow-rate was 0.25 ml/min and the column temperature was kept constant at 40° C.

TABLE 1
gradient elution program used for the separation
α-keto acids, 6-ACA, 5-FVA AAP and homo₍ₙ₎citrate

| Time (min) | 0 | 5.0 | 5.5 | 10 | 10.5 | 15 |
|---|---|---|---|---|---|---|
| % A | 100 | 85 | 20 | 20 | 100 | 100 |
| % B | 0 | 15 | 80 | 80 | 0 | 0 |

[0211] A Waters micromass Quattro micro API was used in electrospray either positive or negative ionization mode, depending on the compounds to be analyzed, using multiple reaction monitoring (MRM). The ion source temperature was kept at 130° C., whereas the desolvation temperature is 350° C., at a flow-rate of 500 L/hr.

[0212] For AKG, AKA, AKP, 5-FVA, homo-citrate and homo2-citrate the deprotonated molecule was fragmented with 10-14 eV, resulting in specific fragments from losses of e.g. H₂O, CO and CO₂.

[0213] For 6-ACA and AAP the protonated molecule was fragmented with 13 eV, resulting in specific fragments from losses of H₂O, NH₃ and CO.

[0214] To determine concentrations, a calibration curve of external standards of synthetically prepared compounds was run to calculate a response factor for the respective ions. This was used to calculate the concentrations in samples. Samples were diluted appropriately (2-10 fold) in eluent A to overcome ion suppression and matrix effects.

### Example 2

### Production of AKP by E. coli

[0215] Construction of an AKP Biosynthetic Pathway

[0216] Protein sequences for the Methanococcus jannaschii proteins homocitrate synthase (AksA, MJ0503, [Sequence ID 4]), homoaconitase small subunit (AksE, MJ1271, [Sequence ID 24]), homoaconitase large subunit (AksD, MJ1003, [Sequence ID 14]) and homoisocitrate dehydrogenase (AksF, MJ1596, [Sequence ID 34]), homologues thereof from Methanococcus manpaludis C5 (homocitrate synthase (AksA, MmarC5_{—}1522, [Sequence ID 7]), homoaconitase small subunit (AksE, MmarC5 1257, [Sequence ID 27]), homoaconitase large subunit (AksD, MmarC5 0098, [Sequence ID 17]) and homoisocitrate dehydrogenase (AksF, MmarC5 0688, [Sequence ID 37]), and A. vinelandii homocitrate synthase NifV, [Sequence ID 75]) were retrieved from databases.

[0217] M. jannaschii and M. maripaludis genes were codon pair optimized for E. coli (using methodology described in WO08000632) and constructed synthetically (Geneart, Regensburg, Germany). In the optimization procedure internal restriction sites were avoided and common restriction sites were introduced at the start and stop to allow subcloning in expression vectors. Also, upstream of AksD the sequence of the tac promoter from pMS470 was added. Each ORF was preceded by a consensus ribosomal binding site and leader sequence to drive translation in pMS470. Also, upstream of AksD the sequence of the tac promoter from pMS470 was added. A synthetic AksA [M. jannashii Sequence ID 167, M. manpaludis Sequence ID 177]/AksF [M. jannashii Sequence ID 168, M. manpaludis Sequence ID 178] cassette was cut with NdeI/XbaI and a synthetic AksD [M. jannashii Sequence ID 169, M. manpaludis Sequence ID 179]/AksE [M. jannashii Sequence ID 170, M. manpaludis Sequence ID 180] cassette was cut with XbaI/HindIII. Fragments containing Aks genes from M. jannashii were inserted in the NdeI/HindIII sites of pMS470 to obtain vector pAKP-180. Fragments containing Aks genes from M. manpaluids were inserted in the NdeI/HindIII sites of pMS470 to obtain vector pAKP-182.

[0218] An E. coli expression construct (pDB555) containing NifV from Azotobacter vinelandii [Sequence ID 149] was obtained from D. Dean (Zheng L, White R H, Dean D R. Purification of the Azotobacter vinelandii nifV-encoded homocitrate synthase. J. Bacteriol. 1997 September; 179(18):5963-6). The nifV gene was PCR amplified using phusion DNA polymerase (Finnzymes) from this vector using primers Avine-WT-R-BamHI [Sequence ID 150] and Avine-WT-F-SacI [Sequence ID 151] and cloned in pAKP-180 upstream of AksA with BamHI/SacI resulting in vector pAKP-281 [ ]. The nifV gene was also PCR amplified from this vector using primers Avine-WT-R-HindIII [Sequence ID 152] and Avine-WT-F-HindIII [Sequence ID 153] and cloned in pAKP-180 and pAKP-182 downstream of AksE [Sequence ID 170] with HindIII resulting in vector pAKP-279 and pAKP-280, respectively.

[0219] To inactivate the aksA gene in pAKP279 and pAKP281, respectively the plasmids were digested with BamHI and Bg/II resulting in three fragments (566 bps, 1134 bps, and 7776 bps). The 1134 bps and 7776 bps sized fragments were isolated from agarose gels and ligated with each other. After transformation to E. coli plasmids were checked for orientation and plasmids in which both fragments are oriented the same way as in the original plasmids pAKP279 and pAKP281 were selected resulting in pAKP322 and pAKP323, respectively.

[0220] Protein Expression and Metabolite Production in E. Coli

[0221] Plasmids pAKP-279, pAKP-280, pAKP-281, pAKP-322 and pAKP-323 were transformed to E. coli BL21 for expression. Starter cultures were grown overnight in tubes with 10 ml 2*TY medium. 200 μl culture was transferred to shake flasks with 20 ml 2*TY medium. Flasks were incubated in an orbital shaker at 30° C. and 280 rpm. After 4h IPTG was added at a final concentration of 0.2 mM and flasks were incubated for 4-16 h at 30° C. and 280 rpm. Cells from 20 ml culture were collected by centrifugation and resuspended in 4 ml M9 medium with a suitable carbon source in 24 well plates. After incubation for 24-72 h at 30-37° C. and 210 rpm cells were collected by centrifugation and pellet and supernatant were separated and stored at −20 C for analysis.

[0222] Preparation of Cell Fraction for Analysis

[0223] Cells from small scales growth (see previous paragraph) were harvested by centrifugation. The cell pellets were resuspended in 1 ml of 100% ethanol and vortexed vigorously. The cell suspension was heated for 2 min at 95° C. and cell debris was removed by centrifugation. The supernatant was evaporated in a vacuum dryer and the resulting pellet was dissolved in 200 μl deionized water. Remaining debris was removed by centrifugation and the supernatant was stored at −20° C.

[0224] Analysis of Supernatant and Cell Extract

[0225] Supernatant and extracts from cell fraction were diluted 5 times with water prior to HPLC-MS/MS analysis. Results clearly show presence of AKP and AAP in recombinant strains. It is contemplated that the conversion of AKP to AAP is catalyzed by a natural aminotransferase present in E. coli.

TABLE 2
AKP production with glucose or glycerol as carbon source

| Plasmid | Fraction | Carbon source | AKP [mg/l] | AAP [mg/l] |
|---|---|---|---|---|
| pAKP-279 | supernatant | Glucose | 3 | n.d. |
| pAKP-279 | cell | Glucose | 2 | n.d. |
| pAKP-281 | supernatant | Glucose | 3 | n.d. |
| pAKP-281 | cell | Glucose | 2 | n.d. |
| pAKP-280 | supernatant | Glucose | 2 | n.d. |
| pAKP-322 | supernatant | Glucose | 10 | 3 |
| pAKP-322 | cell | Glucose | 8 | 12 |
| pAKP-323 | supernatant | Glucose | 7 | 3 |
| pAKP-323 | cell | Glucose | 7 | 1 |
| — | supernatant | Glucose | n.d. | n.d. |
| — | cell | Glucose | n.d. | n.d. |
| pAKP-281 | supernatant | glycerol | 12 | 1 |
| pAKP-281 | cell | glycerol | 6 | 4 |
| pAKP-322 | supernatant | glycerol | 57 | 5 |
| pAKP-322 | cell | glycerol | 8 | 12 |
| pAKP-323 | supernatant | glycerol | 47 | 4 |
| pAKP-323 | cell | glycerol | 4 | 7 |
| — | supernatant | glycerol | n.d. | n.d. |
| — | cell | glycerol | n.d. | n.d. |

n.d. = not detectible

[0226] Results clearly show presence of AKP and AAP in recombinant strains. It is contemplated that the conversion of AKP to AAP is catalyzed by a natural aminotransferase present in E. coli. Removing AksA from the constructs has a positive effect on the amount of AKP and AAP produced.

### Example 3

### Production of AKP by S. cerevisiae

[0227] Construction of an Akp Biosynthetic Pathway

[0228] M. jannaschii genes were codon pair optimized for S. cerevisiae (using methodology described in WO08000632). Promoter and terminator sequences were retrieved from the S. cerevisiae genome database (www.yeastdenome.org, as available on Mar. 31, 2008). The T at position −5 in the tpi1 promoter was changed to A to generate a consensus kozak sequence for S. cerevisiae. Promoter-gene-terminator cassettes were made synthetically (Geneart, Regensburg, Germany), as shown in Table 3.

TABLE 3
Promoter-gene-terminator cassettes

| Promoter | Gene | Terminator |
|---|---|---|
| tdh1 | MJ0503 [Sequence ID 171] | tdh1 |
| tpi1 | MJ1003 [Sequence ID 172] | tpi1 |
| eno1 | MJ1271 [Sequence ID 173] | eno1 |
| tdh3 | MJ1596 [Sequence ID 174] | tdh3 |

[0229] In the optimization procedure internal restriction sites were avoided and common restriction sites were introduced at the beginning and end to allow subcloning in expression vectors.

[0230] The synthetic AksA cassette was cut with SaII/EcoRI and the synthetic AksF cassette was cut with EcoRI/XbaI and both fragments were ligated to pRS415 to obtain pAKP-136. Similarly synthetic AksD and AksE cassettes were inserted into pRS416 to obtain pAKP-146. The AksA-AksF cassette from pAKP-136 was digested with XhoI/KpnI and inserted in pAKP-146 resulting in pAKP-141. Analogous constructs were synthetically made which have a 207 bp sequence encoding a mitochondrial signal peptide (mtSP) [Sequence ID 158] N-terminally fused to MJ0503, MJ1271, MJ1003 and MJ1596 (Pfanner N, Neupert W. Distinct steps in the import of ADP/ATP carrier into mitochondria. J Biol. Chem. 1987 Jun. 5; 262(16):7528-36.). Synthetic fragments consisting of a promoter-mtSP-gene-terminator were combined in pRS416 to obtain pAKP-140. nifVwas PCR amplified from pDB555 using Phusion DNA polymerase with primers AksA-Avine-F [Sequence ID 154] and AksA-Avine-R1 [Sequence ID 155]. The gal2 promoter was amplified from pAKP-47 using phusion DNA polymerase with primers Pga12-F2 [Sequence ID 156] and Pga12-R [Sequence ID 157]. Both PCR fragments were fused by PCR using Phusion DNA polymerase and primers Pga12-F2 [Sequence ID 153] and AksA-Avine-R1 [Sequence ID 155] and the resulting fusion product was cloned in pAKP-47 with HpaI/AscI resulting in pPga12-nifV-Ttdh1. The pPga12-nifV-Ttdh1 cassette was removed from this construct by KpnI/SpeI and inserted into KpnI/SpeI digested pAKP-140 and pAKP-141 replacing MJ0503 (AksA) [Sequence ID 167] and resulting in constructs pAKP-305 and pAKP-306 respectively.

[0231] Construction of an AKP Producing S. cerevisiae Strain

[0232] S. cerevisiae strain CEN.PK113-5D was transformed with 1 μg of pAKP-305 or pAKP-306 plasmid DNA according to the method as described by Gietz and Woods (Gietz, R.D. and Woods, R.A. (2002). Transformation of yeast by the Liac/SS carrier DNA/PEG method. Methods in Enzymology 350: 87-96). Cells were plated on agar plates with 1× Yeast Nitrogen Base without amino acids and 2% glucose.

[0233] Production of AKP with S. cerevisiae

[0234] For production of AKP, starter cultures were aerobically grown overnight in 10 ml tubes containing Verduyn medium with 4% galactose at 30° C. and 280 rpm. Cultures were diluted to an OD of 0.5 in 25 ml fresh Verduyn medium with 4% galactose and incubated anaerobically and aerobically at 30° C. and 280 rpm for 2 and 5 days (aerobic cultures) an 4 days (anaerobic cultures). Cells were harvested by centrifugation and supernatant and cell fraction samples were prepared for HPLC-MS/MS analysis as described for E. coli in the Example 2.

TABLE 4
Results

| Plasmid | Fraction | AKP [mg/l] |
|---|---|---|
| pAKP305 | Supernatant | 1 |
| pAKP305 | Cell | 2 |
| pAKP306 | Supernatant | 1 |

### Example 4

### Cloning of Target Genes for Aminotransferases and Decarboxylases

[0235] Design of Expression Constructs

[0236] attB sites were added to all genes upstream of the ribosomal binding site and start codon and downstream of the stop codon to facilitate cloning using the Gateway technology (Invitrogen, Carlsbad, Calif., USA).

[0237] Gene Synthesis and Construction of Plasmids

[0238] Synthetic genes were obtained from DNA2.0 and codon optimised for expression in E. coli according to standard procedures of DNA2.0. The aminotransferase genes from Vibrio fluvialis JS17 [SEQ ID No. 1] and Bacillus weihenstephanensis KBAB4 [SEQ ID No. 82] encoding the amino acid sequences of the V. fluvialis JS17 ω-aminotransferase [SEQ ID No. 2] and the B. weihenstephanensis KBAB4 aminotransferase (ZP_{—}01186960) [SEQ ID No. 83], respectively, were codon optimised and the resulting sequences [SEQ ID No. 3] and [SEQ ID No. 85] were obtained by DNA synthesis.

[0239] The genes from Escherichia coli [SEQ ID No. 105], Saccharomyces cerevisiae [SEQ ID No. 108], Zymomonas mobilis [SEQ ID No. 111], Lactococcus lactis [SEQ ID No. 114], [SEQ ID No. 117], and Mycobacterium tuberculosis [SEQ ID No. 120] encoding the amino acid sequences of the V. fluvialis JS17 w-aminotransferase [SEQ ID No. 3], the B. weihenstephanensis KBAB4 aminotransferase (ZP_{—}01186960) [SEQ ID No. 84], the Escherichia coli diaminopimelate decarboxylase LysA [SEQ ID No. 106], the Saccharomyces cerevisiae pyruvate decarboxylase Pdc [SEQ ID No. 109], the Zymomonas mobilis pyruvate decarboxylase Pdc1472A [SEQ ID No. 112], the Lactococcus lactis branched chain alpha-keto acid decarboxylase KdcA [SEQ ID No. 115] and alpha-ketoisovalerate decarboxylase KivD [SEQ ID No. 118], and the Mycobacterium tuberculosis alpha-ketoglutarate decarboxylase Kgd [SEQ ID No. 121], respectively, were also codon optimised and the resulting sequences [SEQ ID No. 107], [SEQ ID No. 110], [SEQ ID No. 63], [SEQ ID No. 116], [SEQ ID No. 119], and [SEQ ID No. 122] were obtained by DNA synthesis, respectively.

[0240] The gene constructs were cloned into pBAD/Myc-His-DEST expression vectors using the Gateway technology (Invitrogen) via the introduced attB sites and pDONR201 (Invitrogen) as entry vector as described in the manufacturer's protocols (www.invitrogen.com). This way the expression vectors pBAD-Vfl_AT, pBAD-Bwe_AT pBAD-LysA, pBAD-Pdc, pBAD-Pdc1472A, pBAD-kdcA and pBAD-kivD were obtained, respectively The corresponding expression strains were obtained by transformation of chemically competent E. coli TOP10 (Invitrogen) with the respective pBAD-expression vectors.

[0241] Cloning by PCR

[0242] Various genes encoding a biocatalyst were amplified from genomic DNA by PCR using PCR Supermix High Fidelity (Invitrogen) according to the manufacturer's specifications, using primers as listed in the following table.

TABLE 5
overview of primers used for the various genes

| | gene | enzyme | primer |
|---|---|---|---|
| | Sequence | Sequence | Sequence |
| origin of gene | ID | ID | ID's |
| Pseudomonas aeruginosa | 85 | 86 | 87&88 |
| Pseudomonas aeruginosa | 101 | 102 | 135&136 |
| Pseudomonas aeruginosa | 141 | 142 | 147&148 |
| Pseudomonas aeruginosa | 143 | 144 | 149&150 |
| Bacillus subtilis | 89 | 90 | 123&124 |
| Bacillus subtilis | 91 | 92 | 125&126 |
| Bacillus subtilis | 139 | 140 | 145&146 |
| Rhodobacter sphaeroides | 93 | 94 | 127&128 |
| Legionella pneumophilia | 95 | 96 | 129&130 |
| Nitrosomas europaea | 97 | 98 | 131&132 |
| Neisseria gonorrhoeae | 99 | 100 | 133&134 |
| Rhodopseudomonas palustris | 103 | 104 | 137&138 |

[0243] PCR reactions were analysed by agarose gel electrophoresis and PCR products of the correct size were eluted from the gel using the QIAquick PCR purification kit (Qiagen, Hilden, Germany). Purified PCR products were cloned into pBAD/Myc-His-DEST expression vectors using the Gateway technology (Invitrogen) via the introduced attB sites and pDONR-zeo (Invitrogen) as entry vector as described in the manufacturer's protocols. The sequence of genes cloned by PCR was verified by DNA sequencing. This way the expression vectors pBAD-Pae-_gi9946143_AT, pBAD-Bsu_gi16078032 AT, pBAD-Bsu_gi16080075 AT, pBAD-Bsu_gi1607799_AT, pBAD-Rsp_AT, pBAD-Lpn_AT, pBAD-Neu_AT, pBAD-Ngo_AT, pBAD-Pae_gi9951299_AT, pBAD-Pae gi9951072_AT, pBAD-Pae_gi9951630_AT and pBAD-Rpa_AT were obtained. The corresponding expression strains were obtained by transformation of chemically competent E. coli TOP10 (Invitrogen) with the pBAD constructs.

### Example 5

### Growth of E. coli for Protein Expression

[0244] Small scale growth was carried out in 96-deep-well plates with 940 μl media containing 0.02% (w/v) L-arabinose. Inoculation was performed by transferring cells from frozen stock cultures with a 96-well stamp (Kühner, Birsfelden, Switzerland). Plates were incubated on an orbital shaker (300 rpm, 5 cm amplitude) at 25° C. for 48 h. Typically an OD_{620 nm} of 2-4 was reached.

### Example 6

### Preparation of Cell Lysates

[0245] Preparation of Lysis Buffer

[0246] The lysis buffer contained the following ingredients:

TABLE 6
lysis buffer

| | | |
|---|---|---|
| 1M MOPS pH 7.5 | 5 | ml |
| DNAse I grade II (Roche) | 10 | mg |
| Lysozyme | 200 | mg |
| MgSO₄•7H₂O | 123.2 | mg |
| dithiothreitol (DTT) | 154.2 | mg |

| | |
|---|---|
| H₂O (MilliQ) | Balance to 100 ml |

[0247] The solution was freshly prepared directly before use.

[0248] Preparation of Cell Free Extract by Lysis

[0249] Cells from small scales growth (see previous paragraph) were harvested by centrifugation and the supernatant was discarded. The cell pellets formed during centrifugation were frozen at −20° C. for at least 16 h and then thawed on ice. 500 μl of freshly prepared lysis buffer were added to each well and cells were resuspended by vigorously vortexing the plate for 2-5 min. To achieve lysis, the plate was incubated at room temperature for 30 min. To remove cell debris, the plate was centrifuged at 4° C. and 6000 g for 20 min. The supernatant was transferred to a fresh plate and kept on ice until further use.

[0250] Preparation of Cell Free Extract by Sonification

[0251] Cells from medium scales growth (see previous paragraph) were harvested by centrifugation and the supernatant was discarded. 1 ml of potassium phosphate buffer pH7 was added to 0.5 g of wet cell pellet and cells were resuspended by vigorously vortexing. To achieve lysis, the cells were sonicated for 20 min. To remove cell debris, the lysates were centrifuged at 4° C. and 6000 g for 20 min. The supernatant was transferred to a fresh tube and frozen at −20° C. until further use.

### Example 7

### Preparation of 5-Formylpentanoic Acid by Chemical Hydrolysis of Methyl 5-formylpentanoate

[0252] The substrate for the aminotransferase reaction i.e. 5-formylpentanoic acid was prepared by chemical hydrolysis of methyl 5-formylpentanoate as follows: a 10% (w/v) solution of methyl 5-formylpentanoate in water was set at pH 14.1 with NaOH. After 24 h of incubation at 20° C. the pH was set to 7.1 with HCl.

### Example 8

### Enzymatic Reactions for Conversion of 5-Formylpentanoic Acid to 6-ACA

[0253] Unless specified otherwise, a reaction mixture was prepared comprising 10 mM 5-formylpentanoic acid, 20 mM racemic α-methylbenzylamine, and 200 μM pyridoxal 5′-phosphate in 50 mM potassium phosphate buffer, pH 7.0. 100 μl of the reaction mixture were dispensed into each well of the well plates. To start the reaction, 20 μl of the cell free extracts were added, to each of the wells. Reaction mixtures were incubated on a shaker at 37° C. for 24 h. Furthermore, a chemical blank mixture (without cell free extract) and a biological blank (E. coli TOP10 with pBAD/Myc-His C) were incubated under the same conditions. Samples were analysed by HPLC-MS. The results are summarized in the following table.

TABLE 7
6-ACA formation from 5-FVA in the
presence of aminotransferases

| | 6-ACA concentration |
|---|---|
| Biocatalyst | [mg/kg] |
| E. coli TOP10/pBAD-Vfl_AT | 43* |
| E. coli TOP10/pBAD-Pae_AT | 930 |
| E. coli TOP10/pBAD-Pae_AT | 25* |
| E. coli TOP10/pBAD-Bwe_AT | 24* |
| E. coli TOP10/pBAD-Bsu_gi16077991_AT | 288 |
| E. coli TOP10/pBAD-Pae_gi9951072_AT | 1087 |
| E. coli TOP10/pBAD-Pae_gi9951630_AT | 92 |
| E. coli TOP10 with pBAD/ | 0.6 |
| Myc-His C (biological blank) | |
| None (chemical blank) | n.d. |

n.d.: not detectable
*method differed in that 10 μl cell free extract was used instead of 20 μl, the pyridoxal-5′-phosphate concentration was 50 μM instead of 200 μM and the reaction mixture volume in the wells was 190 μl instead of 100 μl.

[0254] It is shown that 6-ACA is formed from 5-FVA in the presence of an aminotransferase.

### Example 9

### Enzymatic Reactions for Conversion of AKP to 5-Formylpentanoic Acid

[0255] A reaction mixture was prepared comprising 50 mM AKP, 5 mM magnesium chloride, 100 μM pyridoxal 5′-phosphate (for LysA) or 1 mM thiamine diphosphate (for all other enzymes) in 100 mM potassium phosphate buffer, pH 6.5. 4 ml of the reaction mixture were dispensed into a reaction vessel. To start the reaction, 1 ml of the cell free extracts obtained by sonification were added, to each of the wells. In case of the commercial oxaloacetate decarboxylase (Sigma-Aldrich product number 04878), 50 U were used. Reaction mixtures were incubated with a magnetic stirrer at 37° C. for 48 h. Furthermore, a chemical blank mixture (without cell free extract) and a biological blank (E. coli TOP10 with pBAD/Myc-His C) were incubated under the same conditions. Samples from different time points during the reaction were analysed by HPLC-MS. The results are summarized in the following table.

TABLE 8
5-FVA formation from AKP in the presence of decarboxylases

| | 5-FVA concentration [mg/kg] | | |
|---|---|---|---|
| Biocatalyst | 3 h | 18 h | 48 h |
| E. coli TOP10/pBAD-LysA | 150 | 590 | 720 |
| E. coli TOP10/pBAD-Pdc | 1600 | 1700 | 1300 |
| E. coli TOP10/pBAD-Pdcl472A | 2000 | 2000 | 1600 |
| E. coli TOP10/pBAD-KdcA | 3300 | 2300 | 2200 |
| E. coli TOP10/pBAD-KivD | 820 | 1400 | 1500 |
| Oxaloacetate decarboxylase | n.d. | 6 | 10 |
| E. coli TOP10 with pBAD/ | n.d. | n.d. | n.d. |
| Myc-His C (biological blank) | | | |
| None (chemical blank) | n.d. | n.d. | n.d. |

n.d.: not detectable

[0256] It is shown that 5-FVA is formed from AKP in the presence of a decarboxylase.

### Example 10

### Enzymatic Reactions for Conversion of AKP to 6-ACA in Presence of Recombinant Decarboxylase

[0257] A reaction mixture was prepared comprising 50 mM AKP, 5 mM magnesium chloride, 100 μM pyridoxal 5′-phosphate (for LysA) or 1 mM thiamine diphosphate (for all other tested biocatalysts) in 100 mM potassium phosphate buffer, pH 6.5. 4 ml of the reaction mixture were dispensed into a reaction vessel. To start the reaction, 1 ml of the cell free extracts were added, to each of the wells. Reaction mixtures were incubated with a magnetic stirrer at 37° C. for 48 h. Furthermore, a chemical blank mixture (without cell free extract) and a biological blank (E. coli TOP10 with pBAD/Myc-His C) were incubated under the same conditions. Samples from different time points during the reaction were analysed by HPLC-MS. The results are summarized in the following table.

TABLE 9
6-ACA formation from AKP in the presence of decarboxylases

| | 6-ACA concentration | | |
|---|---|---|---|
| | [mg/kg] | | |
| Biocatalyst | 3 h | 18 h | 48 h |
| E. coli TOP10/pBAD-LysA | n.a. | 0.01 | 0 |
| E. coli TOP10/pBAD-Pdc | 0.1 | 0.3 | n.a. |
| E. coli TOP10/pBAD-Pdcl472A | 0.03 | 0.1 | 0.2 |
| E. coli TOP10/pBAD-KdcA | 0.04 | 0.1 | 0.3 |
| E. coli TOP10/pBAD-KivD | n.a. | 0.3 | 0.6 |
| E. coli TOP10 with pBAD/ | n.d. | n.d. | n.d. |
| Myc-His C (biological blank) | | | |
| None (chemical blank) | n.d. | n.d. | n.d. |

n.a. = not analysed
n.d. = not detectable

[0258] It is shown that 6-ACA is formed from AKP in the presence of a decarboxylase. It is contemplated that the E. coli contained natural 5-FVA aminotransferase activity.

### Example 11

### Enzymatic Reactions for Conversion of AKP to 6-ACA in Presence of Recombinant Decarboxylase and Recombinant Aminotransferase

[0259] A reaction mixture was prepared comprising 50 mM AKP, 5 mM magnesium chloride, 100 μM pyridoxal 5′-phosphate, 1 mM thiamine diphosphate and 50 mM racemic α-methylbenzylamine in 100 mM potassium phosphate buffer, pH 6.5. 1.6 ml of the reaction mixture were dispensed into a reaction vessel. To start the reaction, 0.2 ml of the decarboxylase containing cell free extract and 0.2 ml of the aminotransferase containing cell free extract were added, to each of the reaction vessels. Reaction mixtures were incubated with a magnetic stirrer at 37° C. for 48 h. Furthermore, a chemical blank mixture (without cell free extract) and a biological blank (E. coli TOP10 with pBAD/Myc-His C) were incubated under the same conditions. Samples from different time points during the reaction were analysed by HPLC-MS. The results are summarized in the following table.

TABLE 10
6-ACA formation from AKP in the presence of a recombinant
decarboxylase and a recombinant aminotransferase

| | 6-ACA concentration [mg/kg] after 48 hours | | |
|---|---|---|---|
| | AT | | |
| | E. coli TOP10/ | E. coli TOP10/ | E. coli TOP10/pBAD- |
| DC | pBAD-Vfl-AT | pBAD-Bwe-AT | PAE_gi9946143_AT |
| E. coli TOP10/ | 183.4 | 248.9 | 117.9 |
| pBAD-Pdc | | | |
| E. coli TOP10/ | 458.5 | 471.6 | 170.3 |
| pBAD-Pdcl472A | | | |
| E. coli TOP10/ | 497.8 | 497.8 | 275.1 |
| pBAD-KdcA | | | |
| E. coli TOP10/ | 510.9 | 510.9 | 314.4 |
| pBAD-KivD | | | |

AT = aminotransferase
DC = decarboxylase

[0260] In the chemical blank and in the biological blank no 6-ACA was detectable.

[0261] Further, the results show that compared to the example wherein a host-cell with only recombinant decarboxylase (and no recombinant aminotransferase) the conversion to 6-ACA was improved.

### Example 12

### Production of 6-ACA in E. coli

[0262] Preparation of Constructs for Co-Expression of Aminotransferases and a Decarboxylases

[0263] Construction of the plasmids containing genes which encode enzymes for conversion of AKP to 5-formyl valeric acid (5-FVA) and 5-FVA to 6-ACA was done as described in Example 4. To allow co-expression of an aminotransferase and a decarboxylase a tac promoter cassette was PCR amplified from pF113 (a derivative of pJF119EH (Fürste, J. P., W. Pansegrau, R. Frank, H. Blocker, P. Scholz, M. Bagdasarian, and E. Lanka. 1986. Molecular cloning of the plasmid RP4 primase region in a multi-host-range tacP expression vector. Gene 48:119-131.) which contains two NotI sites at positions 515 and 5176 respectively with the tac promoter being the start of the numbering), using Phusion DNA polymerase and primers pF113-F-NsiI (aaattatgcatACAGCATGGCCTGCAACG) and pF113-R-AgeI (aaattaccggtCAGGGTTATTGTCTCATGAG) and the resulting PCR fragment was fused to NsiI/AgeI digested pBBR1MCS (Kovach M E, Phillips R W, Elzer P H, Roop R M 2nd, Peterson K M. Biotechniques. 1994 May; 16(5):800-2. pBBR1MCS: a broad-host-range cloning vector) resulting in pBBR-lac. The aminotransferase gene from Vibrio fluvialis JS17 ((Seq ID NO:1) was codon optimised (Seq ID NO: 3). This codon optimised gene and the gene from Pseudomonas aeruginosa PA01 coding for AT-Vfl and AT-PA01 (Seq ID 85) respectively were PCR amplified from pBAD/Myc-His-DEST-AT-Vfl and pBAD/Myc-his-DEST-PA01 using Phusion DNA polymerase according to the manufacturers specifications using primer pairs AT-Vfl_for_Ec (AAATTT GGTACC GCTAGGAGGAATTAACCATG)+AT-Vfl_rev_Ec (AAATTT ACTAGT AAGCTGGGTTTACGCGACTTC) and AT-Pa01 for Ec (AAATTT GGTACC GCTAGGAGGAATTAACCATG)+AT-Pa01 rev Ec, (AAATTT ACTAGTACAAGAAAGCTGGGTTCAAG) respectively.

[0264] The decarboxylase gene from Lactococcus lactis coding for Lactococcus lactis branched chain alpha-keto acid decarboxylase KdcA (Seq ID NO: 116) was amplified from pBAD/Myc-His-DEST-DC-KdcA by PCR using Phusion DNA polymerase according to the manufacturers specifications and using primers Kdc_for_Ec (AAATTT ACTAGT GGCTAGGAGGAATTACATATG) and Kdc_rev_Ec (AAATTT AAGCTT ATTACTTGTTCTGCTCCGCAAAC). The aminotransferase fragments were digested with KpnI/SpeI and the decarboxylase fragment was digested with SpeI/HindIII. Both fragments were ligated to KpnI/HindIII digested pBBR-lac to obtain pAKP-94 (containing genes encoding AT-PA01 and KdcA) and pAKP-96 (containing genes encoding AT-Vfl and KdcA) respectively.

[0265] Protein Expression and Metabolite Production in E. Coli

[0266] Plasmid pAKP-323 (described in Example 2) was co-transformed with pAKP96 to E. coli BL21 for expression. Cultures were grown as described in Example 2. Samples were prepared for analysis as described in Example 2 and analysed by LC-MS-MS as described in Example 1.

TABLE 11

| Plas- | Plas- | C- | Incu- | me- | Culture | 6-ACA |
|---|---|---|---|---|---|---|
| mid 1 | mid 2 | source | bation | dium | condition | [μg/l] |
| pAKP-323 | pAKP-96 | glucose | 24 h | 2x | 24 wells | 18 |
| | | | | TY | MTP | |
| pAKP-323 | pAKP-96 | glycerol | 24 h | 2x | 24 wells | 109 |
| | | | | TY | MTP | |
| pAKP-323 | pAKP-96 | glucose | 24 h | M9 | 24 wells | 8 |
| | | | | | MTP | |
| pAKP-323 | pAKP-96 | glycerol | 24 h | M9 | 24 wells | 107 |
| | | | | | MTP | |
| pAKP-323 | pAKP-96 | glucose | 24 h | M9 | Shake flask | 1120 |

[0267] E. coli BL21 was either transformed with plasmid pAKP-322 (strains eAKP233), plasmid pAKP96 (Strain eAKP 71) or with plasmid pAKP94 (Strain eAKP70). Cultures were grown overnight in tubes with 10 ml 2*TY medium. 200 μl culture was transferred to shake flasks with 20 ml 2*TY medium. Flasks were incubated in an orbital shaker at 30° C. and 280 rpm. After 4 h IPTG was added at a final concentration of 0.1 mM and flasks were incubated for 4 h at 30° C. and 280 rpm. Cells from 10 ml culture were collected by centrifugation and resuspended in 10 ml M9 medium with 0.4% glucose. The two cultures were mixed in various ratios in 24 well plates and after incubation for 48-72 h at 37° C. and 210 rpm the supernatant was collected by centrifugation and stored at −20 C for analysis. Samples were prepared for analysis by LC-MS-MS as described in Example 2 and analysed as described in Example 1.

TABLE 12

| Strain | Strain | Strain | | 6-ACA |
|---|---|---|---|---|
| eAKP233 | eAKP71 | eAKP70 | Incubation | [μg/l] |
| 5 ml | 0 ml | 0 ml | 48 h | 0 |
| 4 ml | 1 ml | 0 ml | 48 h | 0 |
| 2.5 ml | 2.5 ml | 0 ml | 48 h | 26 |
| 1 ml | 4 ml | 0 ml | 48 h | 40 |
| 0 ml | 5 ml | 0 ml | 48 h | 0 |
| 5 ml | 0 ml | 0 ml | 72 h | 0 |
| 4 ml | 0 ml | 1 ml | 72 h | 68 |
| 2.5 ml | 0 ml | 2.5 ml | 72 h | 71 |
| 1 ml | 0 ml | 4 ml | 72 h | 85 |
| 0 ml | 0 ml | 5 ml | 72 h | 0 |

### Example 13

### Construction of an AKP Biosynthetic Pathway from Other Archae Bacteria

[0268] Protein sequences for the Methanosarcina activorans homoaconitase small subunit (AksE, MA3751, [Sequence ID 225]), homoaconitase large subunit (AksD, MA3085, [Sequence ID 237]) and homoisocitrate dehydrogenase (AksF, MA3748, [Sequence ID 249]), homologues thereof from Methanospirillum hungatei JF-1 homoaconitase small subunit (AksE, Mhun_{—}1799, [Sequence ID 228]), homoaconitase large subunit (AksD, Mhun_{—}1800, [Sequence ID 240]) and homoisocitrate dehydrogenase (AksF, Mhun_{—}1797, [Sequence ID 252]), homologues thereof from Methanococcus maripaludis S2 homoaconitase small subunit (AksE, MMP0381, [Sequence ID 207]), homoaconitase large subunit (AksD, MMP1480, [Sequence ID 195]) and homoisocitrate dehydrogenase (AksF, [Sequence ID 222]), homologues thereof from Methanococcus vannielii SB homoaconitase small subunit (AksE, Mevan_{—}1368, [Sequence ID 201]), homoaconitase large subunit (AksD, Mevan_{—}0789, [Sequence ID 189]) and homoisocitrate dehydrogenase (AksF, Mevan_{—}0040 [Sequence ID 216]), and A. vinelandii homocitrate synthase NifV, [Sequence ID 75]) were retrieved from databases.

TABLE 13

| | | NifV | AksD | AksE | AksF |
|---|---|---|---|---|---|
| Plasmid ID | Donor organism(s) | Seq ID | Seq ID | Seq ID | Seq ID |
| pAKP-358 | Methanosarcina acetivorans & | 149 | 236 | 224 | 248 |
| | Azotobacter vinelandii (NifV) | | | | |
| pAKP-359 | Methanospirillum hungatei JF-1 & | 149 | 239 | 227 | 251 |
| | Azotobacter vinelandii (NifV) | | | | |
| pAKP376 | Methanococcus vannielii SB & | 149 | 188 | 200 | 215 |
| | Azotobacter vinelandii (NifV) | | | | |
| pAKP378 | Methanococcus maripaludis S2& | 149 | 194 | 206 | 221 |
| | Azotobacter vinelandii (NifV) | | | | |

[0269] Genes encoding the homoaconitase small subunit (AksE), homoaconitase large subunit (AksD) and homoisocitrate dehydrogenase (AksF) were codon pair optimized for E. coli (using methodology described in WO08000632) (table 13). Constructs were made synthetically (Geneart, Regensburg, Germany) containing the optimized genes together with the wild-type nifV gene (Seq ID149). In the optimization procedure internal restriction sites were avoided and common restriction sites were introduced at the start and stop to allow subcloning in expression vectors. Also, upstream of AksD the sequence of the tac promoter from pMS470 was added. Each ORF was preceded by a consensus ribosomal binding site and leader sequence to drive translation in pMS470. Also, upstream of AksD the sequence of the tac promoter from pMS470 was added. A synthetic AksA/AksF cassette was cut with NdeI/XbaI and a synthetic AksD/AksE cassette was cut with XbaI/HindIII. Fragments containing Aks genes were inserted in the NdeI/HindIII sites of pMS470 to obtain the vectors pAKP-358, pAKP359, pAKP376 and pAKP378.

[0270] Protein Expression and Metabolite Production in E. Coli

[0271] Plasmids were transformed to E. coli BL21 for expression. Starter cultures were grown overnight in tubes with 10 ml 2*TY medium. 200 μl culture was transferred to shake flasks with 20 ml 2*TY medium. Flasks were incubated in an orbital shaker at 30° C. and 280 rpm. After 4 h IPTG was added at a final concentration of 0.2 mM and flasks were incubated for 4-16 h at 30° C. and 280 rpm. Cells from 20 ml culture were collected by centrifugation and resuspended in 4 ml M9 medium with a suitable carbon source in 24 well plates. After incubation for 24-72 h at 30-37° C. and 210 rpm cells were collected by centrifugation and pellet and supernatant were separated and stored at −20 C for analysis.

[0272] Preparation of Cell Fraction for Analysis

[0273] Cells from small scales growth (see previous paragraph) were harvested by centrifugation. The cell pellets were resuspended in 1 ml of 100% ethanol and vortexed vigorously. The cell suspension was heated for 2 min at 95° C. and cell debris was removed by centrifugation. The supernatant was evaporated in a vacuum dryer and the resulting pellet was dissolved in 200 μl deionized water. Remaining debris was removed by centrifugation and the supernatant was stored at −20° C.

[0274] Analysis of Supernatant and Cell Extract

[0275] Supernatant and extracts from cell fraction were diluted 5 times with water prior to HPLC-MS/MS analysis. Results, shown in Table 14, clearly show presence of AKP and AAP in recombinant strains. It is contemplated that the conversion of AKP to AAP is catalyzed by a natural aminotransferase present in E. coli.

TABLE 14
AKP production with glycerol as carbon source

| Plasmid | Fraction | Carbon source | AKP [mg/l] | AAP [mg/l] |
|---|---|---|---|---|
| — | supernatant | glycerol | n.d. | n.d. |
| — | cell | glycerol | n.d. | n.d. |
| pAKP358 | supernatant | glycerol | 21 | 24 |
| pAKP359 | supernatant | glycerol | 19 | 27 |
| pAKP376 | supernatant | glycerol | 3 | 0.4 |
| pAKP378 | supernatant | glycerol | 650 | 134 |

n.d. = not detectible

[0276] Results clearly show presence of AKP and AAP in recombinant strains. It is contemplated that the conversion of AKP to AAP is catalyzed by a natural aminotransferase present in E. coli.

### Example 14

### Production of 6-ACA from AKP in E. coli

[0277] Preparation of Constructs for Co-Expression of Aminotransferases and Decarboxylases

[0278] Construction of the plasmids encoding enzymes for conversion of AKP to 5-formyl valeric acid (5-FVA) and 5-FVA to 6-ACA was as described in Example 4 whereas the plasmids pAKP94 and pAKP96 were described in example 12. For exchanging the Lactococcus lactis branched chain alpha-keto acid decarboxylase KdcA [SEQ ID No. 115], present in pAKP 94 and pAKP96 with the Zymomonas mobilis pyruvate decarboxylase Pdcl472A [SEQ ID No. 112], and alpha-ketoisovalerate decarboxylase KivD [SEQ ID No. 118], respectively plasmids pBAD-kivD and pBAD-Pdc1472A were digested with Nde1 and HinD3. The 1,6 kb fragment containing the decarboxylase gene was isolated and ligated into the Nde1/HinD3 digested vector pAKP94 yielding pAKP 326 and pAKP327 respectively. Cloning the 1.6 kb Nde1/HinD3 fragments from pBAD-kivD into pAKP96 yielded pAKP330.

[0279] Protein Expression and Metabolite Production in E. Coli

[0280] Plasmids were transformed to E. coli BL21 for expression. Starter cultures were grown overnight in tubes with 10 ml 2*TY medium. 200 μl culture was transferred to shake flasks with 20 ml 2*TY medium. Flasks were incubated in an orbital shaker at 30° C. and 280 rpm. After 4 h IPTG was added at a final concentration of 0.2 mM and flasks were incubated for 4 h at 30° C. and 280 rpm. Cells from 20 ml culture were collected by centrifugation and resuspended in 4 ml 2×TY medium with 1% glycerol and 500 mg/l AKP in 24 well plates. After incubation for 48 h at 30° C. and 210 rpm cells were collected by centrifugation and pellet and supernatant were separated and stored at −20 C for analysis.

TABLE 15
6-ACA production in E. coli

| plasmid | aminotransferase | Decarboxylase | Mg/l AAP | Mg/l 6-ACA |
|---|---|---|---|---|
| pAKP326 | PA01 | kivD | 34 | 21 |
| pAKP327 | PA01 | pdcl472A | 25 | 1 |
| pAKP330 | Vfl | kivD | 18 | 18 |

Results clearly show presence of 6-ACA and AAP in recombinant strains. It is contemplated that the conversion of AKP to AAP is catalyzed by a natural aminotransferase present in E. coli.

The application's sequence listing, which the Patent Office published only in electronic form, follows.

SEQUENCE LISTING (291 sequences)

SEQ ID NO: 1 - DNA, 1362 bp, Vibrio fluvialis
  CDS (1)..(1362)
atgaacaaaccgcaaagctgggaagcccgggccgagacctattcgctctatggtttcaccgacatgccttcgctgcatcagcgcggcacggtcgtcgtgacccatggcgagggaccctatatcgtcgatgtgaatggccggcgttatctggacgccaactcgggcctgtggaacatggtcgcgggctttgaccacaaggggctgatcgacgccgccaaggcccaatacgagcgttttcccggttatcacgcctttttcggccgcatgtccgatcagacggtaatgctgtcggaaaagctggtcgaggtgtcgccctttgattcgggccgggtgttctatacaaactcggggtccgaggcgaatgacaccatggtcaagatgctatggttcctgcatgcagccgagggcaaaccgcaaaagcgcaagatcctgacccgctggaacgcctatcacggcgtgaccgccgtttcggccagcatgaccggcaagccctataattcggtctttggcctgccgctgccgggctttgtgcatctgacctgcccgcattactggcgctatggcgaagagggcgaaaccgaagagcagttcgtcgcccgcctcgcccgcgagctggaggaaacgatccagcgcgagggcgccgacaccatcgccggtttctttgccgaaccggtgatgggcgcgggcggcgtgattcccccggccaagggctatttccaggcgatcctgccaatcctgcgcaaatatgacatcccggtcatctcggacgaggtgatctgcggtttcggacgcaccggtaacacctggggctgcgtgacctatgactttacacccgatgcaatcatctcgtccaagaatcttacagcgggctttttccccatgggggcggtgatccttggcccggaactttccaaacggctggaaaccgcaatcgaggcgatcgaggaattcccccatggctttaccgcctcgggccatccggtcggctgtgctattgcgctgaaagcaatcgacgtggtgatgaatgaagggctggctgagaacgtccgccgccttgccccccgtttcgaggaaaggctgaaacatatcgccgagcgcccgaacatcggtgaatatcgcggcatcggcttcatgtgggcgctggaggctgtcaaggacaaggcaagcaagacgccgttcgacggcaacctgtcggtcagcgagcgtatcgccaatacctgcaccgatctggggctgatttgccggccgcttggtcagtccgtcgtcctttgtccgccctttatcctgaccgaggcgcagatggatgagatgttcgataaactcgaaaaagcccttgataaggtctttgccgaggttgcctga

SEQ ID NO: 2 - protein, 453 aa, Vibrio fluvialis
MNKPQSWEARAETYSLYGFTDMPSLHQRGTVVVTHGEGPYIVDVNGRRYLDANSGLWNMVAGFDHKGLIDAAKAQYERFPGYHAFFGRMSDQTVMLSEKLVEVSPFDSGRVFYTNSGSEANDTMVKMLWFLHAAEGKPQKRKILTRWNAYHGVTAVSASMTGKPYNSVFGLPLPGFVHLTCPHYWRYGEEGETEEQFVARLARELEETIQREGADTIAGFFAEPVMGAGGVIPPAKGYFQAILPILRKYDIPVISDEVICGFGRTGNTWGCVTYDFTPDAIISSKNLTAGFFPMGAVILGPELSKRLETAIEAIEEFPHGFTASGHPVGCAIALKAIDVVMNEGLAENVRRLAPRFEERLKHIAERPNIGEYRGIGFMWALEAVKDKASKTPFDGNLSVSERIANTCTDLGLICRPLGQSVVLCPPFILTEAQMDEMFDKLEKALDKVFAEVA

SEQ ID NO: 3 - DNA, 1362 bp, Artificial Sequence
  Vibrio fluvialis JS17 omega-aminotransferase codon optimised gene
atgaataaaccacagtcttgggaagctcgtgctgaaacctatagcctgtacggctttaccgatatgccgtctctgcaccagcgtggtactgtagtggtaacgcacggtgagggcccgtacatcgtggacgttaatggccgccgttacctggatgcaaacagcggcctgtggaacatggttgcgggcttcgaccacaaaggcctgatcgatgccgcaaaagcgcagtacgaacgcttcccgggttatcacgcgttctttggccgtatgagcgaccagactgtgatgctgagcgaaaaactggttgaagtgtccccgttcgatagcggtcgtgtcttttacactaactctggcagcgaggctaacgataccatggttaagatgctgtggttcctgcacgcagcggaaggcaaacctcagaaacgtaaaattctgacccgttggaacgcttatcacggtgtgactgctgtttccgcatctatgaccggtaaaccgtataacagcgtgttcggtctgccgctgcctggcttcgtgcatctgacctgcccgcactactggcgttatggtgaggaaggcgaaactgaggaacagttcgtggcgcgtctggctcgtgaactggaagaaaccattcaacgcgaaggtgcagatactatcgcgggcttctttgcggagcctgttatgggtgccggcggtgtgattccgccggcgaagggctatttccaggcaatcctgccgatcctgcgcaagtacgacattccggttatttctgacgaagtgatctgcggcttcggccgcaccggtaacacctggggctgcgtgacgtatgacttcactccggacgcaatcattagctctaaaaacctgactgcgggtttcttccctatgggcgccgtaatcctgggcccagaactgtctaagcgcctggaaaccgccatcgaggcaatcgaagagttcccgcacggtttcactgctagcggccatccggtaggctgcgcaatcgcgctgaaggcgatcgatgttgtcatgaacgagggcctggcggaaaacgtgcgccgcctggcgccgcgttttgaagaacgtctgaaacacattgctgagcgcccgaacattggcgaatatcgcggcatcggtttcatgtgggccctggaagcagttaaagataaagctagcaagaccccgttcgacggcaacctgtccgtgagcgaacgtatcgctaatacctgtacggacctgggtctgatctgccgtccgctgggtcagtccgtagttctgtgcccaccatttatcctgaccgaagcgcagatggatgaaatgttcgataaactggagaaagctctggataaagtgttcgctgaagtcgcgtaa

SEQ ID NO: 4 - protein, 406 aa, Methanocaldococcus jannaschii DSM 2661
MTKVLVMFMDFLFENSWKAVCPYNPKLDLKDIYIYDTTLRDGEQTPGVCFTKEQKLEIARKLDELGLKQIEAGFPIVSEREADIVKTIANEGLNADILALCRALKKDIDKAIECDVDGIITFIATSPLHLKYKFNNKSLDEILEMGVEAVEYAKEHGLFVAFSAEDATRTPIEDLIKVHKAAEEAGADRVHIADTTGCATPQSMEFICKTLKENLKKAHIGVHCHNDFGFAVINSIYGLIGGAKAVSTTVNGIGERAGNAALEELIMALTVLYDVDLGLNLEVLPELCRMVEEYSGIKMPKNKPIVGELVFAHESGIHVDAVIENPLTYEPFLPEKIGLKRNILLGKHSGCRAVAYKLKLMGIDYDREMLCEIVKKVKEIREEGKFITDEVFKEIVEEVLRKRNKN

SEQ ID NO: 5 - protein, 391 aa, Methanothermobacter thermoautotrophicum DH
MRYFVSPFNKEAELKFPDRITIYDTTLRDGEQTPGVCLGTEEKLEIARKLDELGIHQIESGFPVVSEQERVSVKSIANEGLNAEILALCRTKKDDIDAAIDCDVDGVITFMATSDLHLKHKLKLTREEALNVCMNSIEYAKDHGLFLAFSAEDATRTDLDFLKQIYRKAENYGADRVHIADTVGAISPQGMDYLVRELRRDIKVDIALHCHNDFGMALSNSIAGLLAGGTAVSTTVNGIGERAGNTSLEELIMALRIIYEVDLGFNIGVLYELSRLVEKHTRMKVPENKPIVGRNVFRHESGIHVDAVIEEPLTYEPFLPEMIGHQRKIVLGKHSGCRAVKAKLEEYGIDVTRDELCRIVEEVKKNREKGKYINDELFYRIVKSVRGPVDF

SEQ ID NO: 6 - protein, 386 aa, Methanococcus maripaludis S2
MDWKAVSPYNPKLDLKDCYLYDTTLRDGEQTPGVCFAGDQKLEIAKKLDELKIKQIEAGFPIVSENERKAIKSITGEGLNAQILALSRVLKEDIDKAIECDVDGIITFIATSPMHLKYKLHKNLDEVEEMGMKAVEYAKDHGLFVAFSAEDATRTPLEDIIRIHKNAEEHGADRVHIADTLGCATPQAMYHICSELSKHLKKAHIGVHCHNDFGFAVINSIYGLIGGAKAVSTTVNGIGERAGNAAIEEIAMALKVLYDHDMGLNTEILTEISKLVENYSKIKIPENKPLVGEMVFYHESGIHVDAVLENPLTYEPFLPEKIGQKRKIILGKHSGCRAVAHRLQELGLEASRDELWEIVKKTKETREDGTEISDEVFKNIAEKIIK

SEQ ID NO: 7 - protein, 386 aa, Methanococcus maripaludis C5
MDWKAVSPYNPKLNLKDCYLYDTTLRDGEQTPGVCFTHDQKLEIAKKLDELKIKQIEAGFPIVSENERKAIKSITGEGLNAQILALSRVLKEDIDKAIECDVDGIITFIAASPMHLKYKLHKSLDEVEEMGMKAVEYAKDHGLFVAFSAEDATRTPVEDLIRIHKNAEEHGANRVHIADTLGCATPQAMYHICSELSSNLKKAHIGVHCHNDFGFAVINSIYGLIGGAKAVSTTVNGIGERAGNAAIEEIVMALKVLYDHDMGLNTEILTEISKLVENYSKIRIPENKPLVGEMAFYHESGIHVDAVLENPLTYEPFLPEKIGQKRKIILGKHSGCRAVAHRLQELGLEASREELWEIVKKTKETREEGTEISDEVFKNIVDKIIK

SEQ ID NO: 8 - protein, 386 aa, Methanococcus maripaludis C7
MDWKAVSPYNPKLDLKDCYLYDTTLRDGEQTPGVCFTHDQKLEIAKKLDELKIKQIEAGFPIVSENERKCIKSITGEGLNAQILALSRVLKEDIDKAIECDVDGIITFIAASPMHLKYKLHKSLDEVEEMGMKAVEYAKDHGLFVAFSAEDATRTPIEDIIRIHKNAEEHGADRVHIADTLGCATPQSMYYICSELSKHLKKAHIGVHCHNDFGFAVINSIYGLLGGAKAVSTTVNGIGERAGNAAIEEIVMALKVLYDYDMGLNTEILTEMSKLVEKYSKIRIPENKPLVGEMAFYHESGIHVDAVLENPLTYEPFLPEKIGQKRKIILGKHSGCRAVAHRLQELGLETSRNELWEIVKKTKETREEGTEISDEVFKNIVDKIIK

SEQ ID NO: 9 - protein, 279 aa, Methanosphaera stadtmanae DSM 3091
MGLSDLHLEVKINKPRDVVNQICMDAIDYGKDHGLFVAFSAEDATRTELPKLLDVYKQAQDHGADRIHIADTTGSINPYATQYLVKNIKKEIDTEIALHCHNDFGFAVANSIAGLFEGATAISTTVNGIGERAGNASLEELIMSLKLLYNKDLGFKTEVIYELSQLVSKYSKIPISDSKAIVGNNVFRHESGIHVDAIVKNPLAYEPFIPEMIGTKRQIVLGKHSGKSAVIEKLDTLNIKVDDTQLSQIVSLVKQERERGEEITNNKFDEILEKVNIKR

SEQ ID NO: 10 - protein, 397 aa, Methanopyrus kandleri AV19
MQSPYVREAVREMDLPDEVIVYDTTLRDGEQTPGVSFTPEQKLEIAHLLDELGVQQIEAGFPVVSEGERDAVRRIAHEGLNADILCLARTLRGDVDAALDCDVDGVITFIATSELHLKHKLRMSREEVLERIADTVEYAKDHGLWVAFSAEDGTRTEFEFLERVYRTAEECGADRVHATDTVGVMIPAAMRLFVAKIREVVDLPIGVHCHDDFGMAVANSLAAVEAGAQAISTTVNGIGERAGNAALEEVIMALKELYGIDPGFNTEVLAELSRKVSEYSGIDVPPNKAVVGENAFRHESGIHVAAVLEEPRTYEPIDPKEVGMNRKIVLGKHTGRKAVVAKLEELGVEPEEEIVEEVLKRIKALGDRRVRVTDSKLEEIVRNVLESRGDRDDPGSR

SEQ ID NO: 11 - protein, 390 aa, Methanobrevibacter smithii ATCC35061
MQYYISHYNKEPELNFPDEITVYDTTLRDGEQTPGVCFSPEEKLEIAKKLDEVKIKQIEAGFPIVSKKEQESVKAITSEGLNAQIISLSRTKKEDIDAALDCDVDGVITFMGTSDIHLEHKMHIGRQEALNTCMNAIEYAKDHGLFVAFSAEDATRTDLDFLKRIYNKAESYGADRVHIADTTGAITPQGITYLVKELKKDVNIDIALHCHNDFGLAVINSISGVLAGANGISTTVNGIGERAGNASLEEVIMSLKLLYGKDLGFKTKHIKELSELVSKASGLPVPYNKPVVGNNVFRHESGIHVDAVIEEPLCYEPYIPELVGQKRQLVLGKHSGCRAVRAKLNECDLDVSDDTLIEIVKKVKKSREEGTYINDDVFKEIVKSCNYKKE

SEQ ID NO: 12 - protein, 386 aa, Methanococcus vannielii SB
MDWKEVSQYNPKLDLKECYVYDTTLRDGEQTPGVCFTGNQKLEIAKKLDDLGIKQIEAGFPTVSENERKCIKSISSEGLNADILALSRVLKEDIDRAIECDVDGIITFVATSPMHLKYKLHKSFEEVEEMGMKAIEYAKDHGLFVAFSAEDATRTSIENIIKIHKNAEDYGADRVHIADTLGCATPQSMYQICSELNKSLKKAHIGVHCHNDFGFAAINSIYGLMGGAKAVSTTVNGIGERAGNAALEEVVMALKVLYNYDMGLNTELIMETSKLVETYSKIKVPENKPLVGEMVFYHESGIHVDAVLENPLTYEPFLPEKIGQKRKIVLGKHSGCRAVAYRLNELGFEATRDELWEIVKKTKETREQGTEISDEVFKNIVTHILN

SEQ ID NO: 13 - protein, 387 aa, Methanococcus aeolicus Nankai 3
MNWKEVCQYNPKLNLEDCYIYDTTLRDGEQTPGVCFSMEQKLDIAKKLDELGVKQIEAGFPAVSKSEIENVKKIANEGLNAEILALSRALQGDIDKALSCDVDGIITFIAASPLHLKYKLHKSIEEVEEMGMKAVEYAKDHGLFVAFSAEDATRTPIEDLVRIHKNAEEHGADRVHIADTTGCGTPQSIQYICSELSNNLKKAHIGVHCHNDFGLAVINSIYGLLGGAKAASTTVNGIGERAGNAPLEELLLTMNVLYDVKTDLNISIIKELSTMVENYSGIKIPVNKPIVGDKVFYHESGIHVDAVIENPLTYEPFLPERIGQKREIVLGKHSGCSAVESKLKELGLEVPKDRIWDLVKKVKTTREGGEDIDDEMFIKIVDIINKQ

SEQ ID NO: 14 - protein, 420 aa, Methanocaldococcus jannaschii DSM 2661
MTLVEKILSKKVGYEVCAGDSIEVEVDLAMTHDGTTPLAYKALKEMSDSVWNPDKIVVAFDHNVPPNTVKAAEMQKLALEFVKRFGIKNFHKGGEGICHQILAENYVLPNMFVAGGDSHTCTHGAFGAFATGFGATDMAYIYATGETWIKVPKTIRVDIVGKNENVSAKDIVLRVCKEIGRRGATYMAIEYGGEVVKNMDMDGRLTLCNMAIEMGGKTGVIEADEITYDYLKKERGLSDEDIAKLKKERITVNRDEANYYKEIEIDITDMEEQVAVPHHPDNVKPISDVEGTEINQVFIGSCTNGRLSDLREAAKYLKGREVHKDVKLIVIPASKKVFLQALKEGIIDIFVKAGAMICTPGCGPCLGAHQGVLAEGEICLSTTNRNFKGRMGHINSYIYLASPKIAAISAVKGYITNKLD

SEQ ID NO: 15 - protein, 428 aa, Methanothermobacter thermoautotrophicum DH
MVKMNMTEKILAEAAGLREVTPGEIIEARVDLAMTHDGTSPPTIRTFRDIASRGGPARVWDPERIVMVFDHNVPANTIGAAEFQRVTREFAREQGIVNIFQNAAGICHQVLPERGFVRPGMVIVGADSHTCTYGAFGAFATGMGATDMAMVFATGKTWFMVPEAMRIEVTGEPEGHVYAKDVILHIIGEIGVDGATYRSVEFTGDTIESMDVSGRMTICNMAVEMGAKNGIMEPNRQTLDYVRARTGREFRVYSSDEDSQYLEDHHFDVSDLEPQVACPDDVDNVYPVHRVEGTHIDEAFLGSCTNGRYEDLKIAAEVIGDRRVHEDVRFIVSPASREIYLKALEDGIIETFIRAGAIVCNPGCGPCLGAHMGVLAPGEVSIATTNRNFRGRMGDPASSVYLANPAVVAESAIEGVISAPQQEAGNGC

SEQ ID NO: 16 - protein, 418 aa, Methanococcus maripaludis S2
MTLAEKIISKNVGKNVYAKDSVEISVDIAMTHDGTTPLTVKAFEQISDKVWDNEKIVIIFDHNIPANTSKAANMQVITREFIKKQGIKNYYLDGEGICHQVLPEKGHVKPNMIIAGADSHTCTHGAFGAFATGFGATDMGYVYATGKTWLRVPETIRVNVTGENENISGKDIILKTCKEVGRRGATYMSLEYGGNAVHNLSMDERMVLSNMAIEMGGKAGIIEADDTTYRYLENAGVSREEILELKKNKITVDESEEDYYKTIEFDITGMEEQVACPHHPDNVKGVSEVEGTELNQVFIGSCTNGRLNDLRIAAKYLKGKKVNENTRLIVIPASKSIFKEALNEGLIDIFVDSGALICTPGCGPCLGAHQGVLGDGEVCLATTNRNFKGRMGNTNAQVYLSSPKIAAKSAVKGYITNE

SEQ ID NO: 17 - protein, 418 aa, Methanococcus maripaludis C5
MTLAEKIISKNVGKNVYAGDSVEIDVDVAMTHDGTTPLTVKAFEQISDKVWDNEKIVIIFDHNIPANTSKAANMQVITREFIKKQGIKNYYLDGEGICHQVLPEKGHVKPNMIIAGADSHTCTHGAFGAFATGFGATDMGYVYATGKTWLRVPETIQVNVTGENENISGKDIILKTCKEVGRRGATYLSLEYGGNAVQNLDMDERMVLSNMAIEMGGKAGIIEADDTTYKYLENAGVSREEILNLKKNKIKVNESEENYYKTFEFDITDMEEQIACPHHPDNVKGVSEVSGIELDQVFIGSCTNGRLNDLRIAAKHLKGKKVNESTRLIVIPASKSIFKEALKEGLIDTFVDSGALICTPGCGPCLGAHQGVLGDGEVCLATTNRNFKGRMGNTKSEVYLSSPAIAAKSAVKGYITNE

SEQ ID NO: 18 - protein, 418 aa, Methanococcus maripaludis C7
MTLAEKIISKNVGKNVYAGDSVEIDVDIAMTHDGTTPLTVKAFEQISDKVWDNEKIVIIFDHNIPANTSKAANMQVITREFIKKHGIKNYYLDGEGICHQVLPEKGHVKPNMIIAGADSHTCTHGAFGAFATGFGATDMGFVYATGKTWLRVPETIRVNVTGENENISGKDIILKTCKEVGRSGATYMSLEYGGNAVQNLEMNERMVLSNMAIEMGGKAGIIEADDTTYKYLENAGVSREEILNLKKNKITVNESEENYYKTIEFDITDMEEQIACPHNPDNVKGVSEVSGTELDQVFIGSCTNGRLNDLRIAAKYLKGKKVNENTRLIVIPASKSIFAGALKEGLIDIFVESGALICTPGCGPCLGAHQGVLGDGEVCLATTNRNFKGRMGNTKAEVYLSSPKIAAKSAVKGYITNE

SEQ ID NO: 19 - protein, 415 aa, Methanosphaera stadtmanae DSM 3091
MNISEKILAKASNKEEVSPGDTITANIDVAMSHDGTSPPTIKVFEKIADKVWDPEKIVLVFDHVIPANTIGSAEFQQVVREFGKKQKIPNMYIQGEGVCHEVLPDYGHVKPSTVIVGADSHTCTYGAFGAFSTGLGATDLAMVYATGQTWFNVPESLKINVNGTLNENVYSKDVILKIIKELGAYGATYKSLEFHGDTIDNMSVASRLTMTNMAIECGAKNGIMVPNKQTKEYLSQRGITDYTITTASKDAEYEKIYDFDVDDLQPQIACPHNVDNVEDIDKVAGTHIDQAVLGSCTNGRYEDLLQAAEVIEGHKIHEDVELLVFPASRHVYEKAIETGVIQTLLKSNAIICNPGCGPCLGAHMGVMTDDMTCISTTNRNFLGRMGSAKSYVYLSNPAVVAASAIKGEITNPSEI

SEQ ID NO: 20 - protein, 418 aa, Methanopyrus kandleri AV19
MGKTMAEKILSRASGEDAEAGDIVVANIDVAMVHDITGPITVQRLEEMGVERVWDPSKIVVLFDHQVPADSVEAAENHKIMREFVEEQGIEHFYDVREGVCHQVLPEKGHVRPGDVIVGADSHTCTHGALGAFATGIGSTDMAAVFATGKLWFRVPETYRVEITGELPEGVYAKDVVLKVTGEIGADGATYMAIEYHGEVVREMSVSDRMCLCNMAIEMGAKTGMVPPDEKTLEYVKKRAGTEGRPVEPDPDARYEAELTLDVSDLEPQVAKPFSPDNVVPVGEVEGIAIDQVFIGSCTNGRYEDLKVAAEVLEGEEVHDDVRLIVIPASREVYHRTLKDGVLEVLHEAGALICPPNCGPCLGGHMGVLAEGERCVATSNRNFPGRMGHRESEVYLASPATAAASAIEGEITDPRPYL

SEQ ID NO: 21 - protein, 417 aa, Methanobrevibacter smithii ATCC35061
MNITEKILSAKAKKEVTPGEIIEIPVDLAMSHDGTSPPAIKTFEKVATKVWDNEKIAIVFDHNVPANTIGSAEFQKVCRDFIKKQKITKNYIHGDGICHQVLPEKGLVEPGKVIVGADSHTCTYGAYGAFSTGMGATDLAMVYATGKTWFMVPEAIKMEVSGELNSYTAPKDIILKIIGEVGIAGATYKTAEFCGETIEKMGVEGRATICNMAIEMGAKNGIMEPNKEVIQYVSQRTGKKESELNIVKSDEDAQYSEEMHFDITDMEPQIACPNDVDNVKDISKVEGTAVDQCLIGSCTNGRLSDLKDAYEILKDNEINNDTRLLILPASAEIYKQAIHEGYIDAFIDAGAIICNPGCGPCLGGHMGVLSEGETCLSTTNRNFKGRMGDPKSSVYLANSKVVAASAIEGVITNPKDL

SEQ ID NO: 22 - protein, 418 aa, Methanococcus vannielii SB
MTLAEAILSKKLGKNVYAKDSVEIDVDLAMTHDGTTPLTVKAFEEISDRVFDNKKIVIVFDHNIPANTSKAANMQIITRDFIKKHDIKNYYLDGEGICHQILPEKGHVKPNMVIVGADSHTCTHGAFGAFATGFGASDMGYVYATGKTWFRVPETIRVNVTGKNENISGKDIVLKTCKEVGRSGATYMALEYGGSAVKALNMDERMVLCNMAIEMGGKVGLIEADHTTYDYLKNAGVSNQEIAELQRNKISITENEETYFKTVEFDITDMEEQVACPHHPDNVKGISEVLGTPIDQIFIGSCTNGHIGDLRIAAKILKGKSINKNTRLIVIPASKSILKQALNEGLIDIFVDFGALICAPGCGPCLGAHEGVLGDGEVCLATTNRNFKGRMGNINSEVYLSSPAIAAKSAIKGHITNE

SEQ ID NO: 23 - protein, 421 aa, Methanococcus aeolicus Nankai 3
MTLAEEILSKKVGKKVKAGDVVEIDIDLAMTHDGTTPLSAKAFKQITDKVWDNKKIVIVFDHNVPANTLKAANMQKITREFIKEQNIINHYLDGEGVCHQVLPENGHIQPNMVIAGGDSHTCTYGAFGAFATGFGATDMGNIYATGKTWLKVPKTIRINVNGENDKITGKDIILKICKEVGRSGATYMALEYGGEAIKKLSMDERMVLSNMAIEMGGKVGLIEADETTYNYLRNVGISEEKILELKKNQITIDENNIDNDNYYKIINIDITDMEEQVACPHHPDNVKNISEVKGAPINQVFIGSCTNGRLNDLRIASKYLKGKKVHNDVRLIVIPASKSIFKQALKEGLIDIFVDAGALICTPGCGPCLGAHQGVLGDGEVCLATTNRNFKGRMGNTTAEIYLSSPAIAAKSAIKGYITNE

SEQ ID NO: 24 - protein, 170 aa, Methanocaldococcus jannaschii DSM 2661
MIIKGRAHKFGDDVDTDAIIPGPYLRTTDPYELASHCMAGIDENFPKKVKEGDVIVAGENFGCGSSREQAVIAIKYCGIKAVIAKSFARIFYRNAINVGLIPIIANTDEIKDGDIVEIDLDKEEIVITNKNKTIKCETPKGLEREILAAGGLVNYLKKRKLIQSKKGVKT

SEQ ID NO: 25 - protein, 170 aa, Methanothermobacter thermoautotrophicum DH
MEGIIRGRVWRFGDNVDTDMIIPGRYLRTFSLDELASHVMEGARPEFASQVRKGDIIVAGRNFGCGSSREQAPVALKHAGVVAIIAESFARIFYRNAINIGLPVIMAKVDADDGDEVSIDLRSGQIRNLTAGSEYRMKPFNDYMLSILEDGGLVNHYLKTIDTGISGDEG

SEQ ID NO: 26 - protein, 161 aa, Methanococcus maripaludis S2
MKITGKVHLFGDDIDTDAIIPGAYLKTTDEYELASHCMAGIDENFPERVEDGDFLVAGENFGCGSSREQAPIAIKYCGIKAIIVESFARIFYRNCINLGVFPIECKGISKHVKDGDVIELDLEEKKVILKDTVLDCNLPTGTAKDIMDEGGLINYAKKQKN

SEQ ID NO: 27 - protein, 161 aa, Methanococcus maripaludis C5
MKITGKVHVFGDDIDTDAIIPGAYLKTTDEYELASHCMAGIDEDFPEMVKEGDFLVAGENFGCGSSREQAPIAIKYCGIKAIIVESFARIFYRNCINLGVFPIECKGISKHVKDGDLIELDLENKKVILKDKVLDCHIPTGTAKDIMDEGGLINYAKKQKN

SEQ ID NO: 28 - protein, 161 aa, Methanococcus maripaludis C7
MKITGKVHLFGDDVDTDAIIPGAYLKTTDEYELASHCMAGIDEDFPEMVEEGDFLVAGENFGCGSSREQAPIAIKYCGIKAIIVESFARIFYRNCINLGVFPIECKGISKHVKDGDSIELDLENKKVILKDTVLNCHLPTGTAKEIMDEGGLINYAKKHKN

SEQ ID NO: 29 - protein, 163 aa, Methanosphaera stadtmanae DSM 3091
MDSMKGKVWTFRDCIDTDVIIAGRYLRTFNPEDLAAHVMEAEDPEFSSKVGKGDIIVGGWNFGCGSSREQAPVAIKTAGVSAVIAKSFARIFYRNAINIGLPVITADIEVDEGDILEVNIEDGIIINETTKKTFKIKPFDAEMLDILENGGLVNQYLKNKKEV

SEQ ID NO: 30 - protein, 170 aa, Methanopyrus kandleri AV19
MRDVIRGRAWVFGDDIDTDQIIPGRYLTTQDPEELAKHVMEGADPEFPEKVREGDVIVAGKNFGCGSSREHAPIALKAAGIACVVTRSFARIFYRNAINLGLPLVVCPGVDDAFEDGQGIEVNLREGYVRNLDTGEELEAKPLPDFMMRILEAGGLVELIKREGPRAFEG

SEQ ID NO: 31 - protein, 161 aa, Methanobrevibacter smithii ATCC35061
MDIIKGKTWTFGENIDTDVIIPGRYLRTFNPQDLADHVLEGERPDFTKNVKKGDIIVADENFGCGSSREQAPVAIKTAGVDAIVAKSFARIFYRNAINIGLPVIVCDIQAKDGDIINIDLSKGILTNETTGESVTFEPFKEFMLDILEDNGLVNHYLKEKQ

SEQ ID NO: 32 - protein, 161 aa, Methanococcus vannielii SB
MKLKGKAHVFSDDVDTDAIIPGAYLRTTDVYELASHCMAGIDENFPKKVNLGDFIVAGENFGCGSSREQAPISIKYLGISAIIAESFARIFYRNSINLGVIPIECKNISKHVKTGDLIELDLENKKIILKDIVLECTVPTGKAKEIIDLGGLINYAKAQMG

SEQ ID NO: 33 - protein, 165 aa, Methanococcus aeolicus Nankai 3
MIIKGNIHLFGDDIDTDAIIPGAYLKTTDPKELASHCMAGIDEKFSTKVKDGDIIVAGENFGCGSSREQAPISIKHTGIKAVVAESFARIFYRNCINIGLIPITCEGINEQIQNLKDGDTIEIDLQNETIKINSMMLNCGAPKGIEKEILDAGGLVQYTKNKLKK

SEQ ID NO: 34 - protein, 347 aa, Methanocaldococcus jannaschii DSM 2661
MMKVCVIEGDGIGKEVIPEAIKILNELGEFEIIKGEAGLECLKKYGNALPEDTIEKAKEADIILFGAITSPKPGEVQNYKSPIITLRKMFHLYANVRPINNFGIGQLIGKIADYEFLNAKNIDIVIIRENTEDLYVGRERLENDTAIAERVITRKGSERIIRFAFEYAIKNNRKKVSCIHKANVLRITDGLFLEVFNEIKKHYNIEADDYLVDSTAMNLIKHPEKFDVIVTTNMFGDILSDEASALIGGLGLAPSANIGDDKALFEPVHGSAPDIAGKGIANPMASILSIAMLFDYIGEKEKGDLIREAVKYCLINKKVTPDLGGDLKTKDVGDEILNYIRKKLKGY

SEQ ID NO: 35 - protein, 331 aa, Methanothermobacter thermoautotrophicum DH
MYRITVIPGDGIGVEVMEAALHVLQALEIEFEFTHAEAGNECFRRCGDTLPEETLKLVRKADATLFGAVTTVPGQKSAIITLRRELDLFANLRPVKSLPGVPCLYPDLDFVIVRENTEDLYVGDEEYTPEGAVAKRIITRTASRRISQFAFQYAQKEGMQKVTAVHKANVLKKTDGIFRDEFYKVASEYPQMEANDYYVDATAMYLITQPQEFQTIVTTNLFGDILSDEAAGLIGGLGLAPSANIGEKNALFEPVHGSAPQIAGKNIANPTAMILTTTLMLKHLNKKQEAQKIEKALQKTLMRGIMTPDLGGTASTMEMAEAIKEEIVKGE

SEQ ID NO: 36 - protein, 339 aa, Methanococcus maripaludis S2
MRNTPKICVINGDGIGNEVVPETVRVLNELGDFEFIHAHAGYECFKRCGDAIPENTIEIAKESDCILFGSVTTPKPTELKNKSYRSPILTLRKELDLYANIRPTYNFDNLDFVIIRENTEGLYVKKEYYDEKNEVAIAERIISKFGSSRIVKFAFDYAVQNNRKKVSCIHKANVLRVTDGLFLEVFEEMSKHYEKLGIKSDDYLIDATAMYLIRNPQMFDVLVTTNLFGDILSDEAAGLIGGLGMSPSANIGDKNGLFEPVHGSAPDIAGKGISNPIATILSAAMMLDHLKMNKEAEYIRKAVKKTVECKYLTPDLGGNLKTFEVTEKIIESIRSQMIQ

SEQ ID NO: 37 - protein, 339 aa, Methanococcus maripaludis C5
MRNTPKICVINGDGIGNEVIPETVRVLNEIGDFEFIETHAGYECFKRCGDAIPEKTIEIAKESDSILFGSVTTPKPTELKNKPYRSPILTLRKELDLYANIRPTFNFKNLDFVIIRENTEGLYVKKEYYDEKNEVATAERIISKFGSSRIVKFAFDYALQNNRKKVSCIHKANVLRITDGLFLGVFEEISKKYEKLGIVSDDYLIDATAMYLIRNPQMFDVMVTTNLFGDILSDEAAGLIGGLGMSPSANIGDKNGLFEPVHGSAPDIAGKGISNPIATILSAAMMLDHLKINKEAEYIRNAVKKTVECKYLTPDLGGHLKTSEVTEKIIESIKSQMIQ

SEQ ID NO: 38 - protein, 339 aa, Methanococcus maripaludis C7
MRNTPKICVINGDGIGNEVIPETVRVLSEIGDFEFIETHAGYECFKRCGDAIPEKTIEIAKESDSILFGSVTTPKPTELKNKPYRSPILTLRKELDLYANIRPTFNFKDLDFVIIRENTEGLYVKKEYYDEKNEVAIAERVISKFGSSRIVKYAFDYALQNNRKKVSCIHKANVLRITDGLFLEVFEEISKKYEKLGIASDDYLIDATAMYLIRNPQMFDVMVTTNLFGDILSDEAAGLIGGLGMSPSANIGDKNGLFEPVHGSAPDIAGKGISNPIASILSAAMMLDHLNMNKEAECIRNAVKKAVECKYLTPDLGGNLKTSEVTDKIIESIKSQMVQ

SEQ ID NO: 39 - protein, 323 aa, Methanosphaera stadtmanae DSM 3091
MYKITVIPGDGIGQEVMQPTIDILETLNSKFEFIPKEAGKECYQKYDTNLPEETIVQCRESDSTLFGAVTSIPQQKSAIVTLRKELDLYVNQRPIHSYTNPDIDFTIIRENSEGLYSHIEESTGDEAIAIRKITYKASERIINYAFNYALKTEKSKVTASHKANVLPVTDGIFKNTFYKVASNYPTIKSNDYYIDAMAMYLITNPAQFDIIVTTNLFGDILSDEGGGLVGTLGLIPSANIGDKTGLFEPVHGSAPDIAGLNKANPIAMILSSCLMLEYLGLYDDAKRIQNAVEETISESKVKTPDMGGHNNTQDVANNILHRL

SEQ ID NO: 40 - protein, 335 aa, Methanopyrus kandleri AV19
MAYKIAVIPGDGIGPEVIEAALHVIEPLIDAEFVEGEAGDECAEKHGDPLPEDTLELCHEADAILFGAAGETAADVIVRLRQELDLYANIRPVRGFPGLRELTGEPYVRDDVDFVIVRENTEGLYSGIEGRFRDTAYTLRIITEEGTRRIAEVACDLAEERGSNTVTCVHKANVMRETCGLFREVCKEVVESRGLEFEEYYVDAAAMFMITEPERFDVVVTPNMFGDILSDEAAALVGGLGLAPSGNVGDRHGLFEPVHGSAPDIAGKGIANPFATILSAVMMLEWLGEDEAAEAVREAVGEAIREGVVTPDLGGDKKTMEVAEFVREAALNRVQ

SEQ ID NO: 41 - protein, 336 aa, Methanobrevibacter smithii ATCC35061
MSTSNKKDNKYQIAVIPGDGIGKEVMEATISVLDELDVDFDYIYGIAGDECNEEHGTPLPQETIDIVRDSDACLFGAAGETAADVIVKIRQEMKMFANLRPVKSYPNTKSLFENVDFMIVRENTEGLYIADQEEETEDGAIAKRVITREAEERIIDYAFQYAKDNNRTKVTAVHKANVLKKTDGLFKKIFYEVGEKYPDIDTEDFYVDATAMYLVTQPQEFQVVVTTNLFGDILSDEGAGLVGGLGLIPSANIGADGALFEPVHGSAPDIAGQQKANPIAMMLSAIMMLRYLGENDAADKFDAAILKVLSEGKTLTGDLGGSATTMEVAQAVKNAL

SEQ ID NO: 42 - protein, 337 aa, Methanococcus vannielii SB
MGYMPKICVITGDGIGKEVVPETLRVLNEVHDFEYIEAHAGYECFKRCGESIPESTIQTAKNSDSILFGSVTTPKPTELKNKPYRSPILTLRQELDLYANIRPTYNFKDLDFVIIRENTECLYVKREYYDEINEVAIAERIISKKGSERIIKFAFEYARLNNRKKVSCIHKANVLRVTDGLFLEIFEKIAKLYENFGISSNDYLIDATAMYLIKNPYMFDVMVTTNLFGDILSDEAAGLIGGLGMSPSANIGDNLGLFEPVHGSAPDIAGKGISNPIATILSASMMLDHLKMNKKAEIIRNAVKKTINNGYLTPDLGGSLKTSEVVNKVIEFIRDEI

SEQ ID NO: 43 - protein, 343 aa, Methanococcus aeolicus Nankai 3
MKIPKICVIEGDGIGKEVIPETVRILKEIGDFEFIYEHAGYECFKRCGDAIPEKTLKTAKECDAILFGAVSTPKLDETERKPYKSPILTLRKELDLYANVRPIHKLDNSDSSNNIDFIIIRENTEGLYSGVEYYDEEKELAISERHISKKGSKRIIKFAFEYAVKHHRKKVSCIHKSNILRITDGLFLNIFNEFKEKYKNEYNIEGNDYLVDATAMYILKSPQMFDVIVTTNLFGDILSDEASGLLGGLGLAPSANIGDNYGLFEPVHGSAPDIAGKGVANPIAAVLSASMMLYYLDMKEKSRLLKDAVKQVLAHKDITPDLGGNLKTKEVSDKIIEELRKIS

SEQ ID NO: 44 - protein, 440 aa, Saccharomyces cerevisiae
MSENNEFQSVTESTTAPTTSNPYGPNPADYLSNVKNFQLIDSTLREGEQFANAFFDTEKKIEIARALDDFGVDYIELTSPVASEQSRKDCEAICKLGLKAKILTHIRCHMDDARVAVETGVDGVDVVIGTSKFLRQYSHGKDMNYIAKSAVEVIEFVKSKGIEIRFSSEDSFRSDLVDLLNIYKTVDKIGVNRVGIADTVGCANPRQVYELIRTLKSVVSCDIECHFHNDTGCAIANAYTALEGGARLIDVSVLGIGERNGITPLGGLMARMIVAAPDYVRSKYKLHKIRDIENLVADAVEVNIPFNNPITGFCAFTHKAGIHAKAILANPSTYEILDPHDFGMKRYIHFANRLTGWNAIKSRVDQLNLNLTDDQIKEVTAKIKKLGDVRPLNIDDVDSIIKDFHAELSTPLLKPVNKGTDDDNIDISNGHVSKKAKVTK

SEQ ID NO: 45 - protein, 428 aa, Saccharomyces cerevisiae
MTAAKPNPYAAKPGDYLSNVNNFQLIDSTLREGEQFANAFFDTEKKIEIARALDDFGVDYIELTSPVASEQSRKDCEAICKLGLKAKILTHIRCHMDDAKVAVETGVDGVDVVIGTSKFLRQYSHGKDMNYIAKSAVEVIEFVKSKGIEIRFSSEDSFRSDLVDLLNIYKTVDKIGVNRVGIADTVGCANPRQVYELIRTLKSVVSCDIECHFHNDTGCAIANAYTALEGGARLIDVSVLGIGERNGITPLGGLMARMIVAAPDYVKSKYKLHKIRDIENLVADAVEVNIPFNNPITGFCAFTHKAGIHAKAILANPSTYEILDPHDFGMKRYIHFANRLTGWNAIKARVDQLNLNLTDDQIKEVTAKIKKLGDVRSLNIDDVDSIIKNFHAEVSTPQVLSAKKNKKNDSDVPELATIPAAKRTKPSA

SEQ ID NO: 46 - protein, 393 aa, Kluyveromyces lactis
MSVNSNPYAPSPNDLLSNVCNFQLIESTLREGEQFASAFFSTEKKIEIAKALDDFGVDYIELTSPVASEQSRSDCEAICKLGLKAKILTHIRCHMDDARVAVETGVDGVDVVIGTSKFLREYSHGKDMNYIAKSAIEVIEFVKSKGLEIRFSSEDSFRSDIVDLLNIYKTVDKIGVNRVGIADTVGCANPRQVYELVRTLKSVVSCDIECHFHDDTGCAIGNSYSALEAGARLIDVSVLGIGERNGITSLGGLMARMIVSAPEYVKSKYKLHKLRDLENLVADAVSVNVPFNNPITGFCAFTHKAGIHAKAILANPSTYEILNPEDFGMKRYIHFANRLTGWNAIKSRVEQLNLHLSDDQIKEVTSKIKQIGDVRQLSIEDVDTIIKDYHSEL

SEQ ID NO: 47 - protein, 490 aa, Phanerochaete chrysosporium
  MISC_FEATURE (62)..(62): Xaa can be any naturally occuring amino acid
LSILVAIQKLEPCCKMCPHANGDSTPNDPSQMVPVDLSNGTSHQASVQSNSNGHAATNGAAXNPYAPRASDFLSNVSNFKIIESTLREGEQFANAFFDTKTKIAIAKALDAFGVEYIELTSPAASEQSRRDCEAICKLGLKAKILTHIRCHMDDARIAVETGVDGVDVVIGTSSFLREFSHGKDMAYITKTAIEVIEFVKSKGIEVRFSSEDSFRSDLVDLLSIYQTVDKIGVNRVGIADTVGCANPRQVYDLVRTLRGVVKCDIEIHLHNDTGMAIANAYTALEAGATHIDTSVLGIGERVGITPLGGLVACLYAANPEYVKSKYNLPMLREIENLVAEAVEVNIPFMNPITGYCAFTHKAGIHAKAILNNPSTYEILKPEDFGLTRYVSIGHRLTGWNAVKSRVEQLGLKLTDEEIKDVTAKIKELADVRTQSMDDVDTLLRVYHSGIQSGELAAGQREALDRLLRKHREGTMSREPSVSRPSTPTQA

SEQ ID NO: 48 - protein, 441 aa, Kluyveromyces lactis
MSSNQDFQPVTESASSVTKFQQNPYGPNPADYLSNVNNYQLIDSTLREGEQFANAFFDTEKKIEIAKALDDFGVDYIELTSPVASEQSRRDCEAICKLGLKAKILTHIRCHMDDARVAVETGVDGVDVVIGTSKFLRQYSHGKDMNYIAKSAIEVIEFVKSKGIEIRFSSEDSFRSDLVDLLNIYKTVDKIGVNRVGIADTVGCANPRQVYELVRTLKSVVSCDIECHFHNDTGCAIANAYTALEGGARLIDVAVLGIGERNGITPLGGLMARMIVAAPEYTKSKYKLHKIRDIENLIAEAVEVNIPFNNPITGFCAFTHKAGIHAKAILANPSTYEILDPHDFGMKRYIHFANRLTGWNAIKSRVDQLNLNLTDDQVKEVTAKIKKLGDIRPLNIDDVDSIIKDFHAEVSTPQLRAVRRDDNDVNDIDIQEPSNKKTKVE

SEQ ID NO: 49 - protein, 418 aa, Schizosaccharomyces pombe
MSVSEANGTETIKPPMNGNPYGPNPSDFLSRVNNFSIIESTLREGEQFANAFFDTEKKIQIAKALDNFGVDYIELTSPVASEQSRQDCEAICKLGLKCKILTHIRCHMDDARVAVETGVDGVDVVIGTSQYLRKYSHGKDMTYIIDSATEVINFVKSKGIEVRFSSEDSFRSDLVDLLSLYKAVDKIGVNRVGIADTVGCATPRQVYDLIRTLRGVVSCDIECHFHNDTGMAIANAYCALEAGATHIDTSILGIGERNGITPLGALLARMYVTDREYITHKYKLNQLRELENLVADAVEVQIPFNNYITGMCAFTHKAGIHAKAILANPSTYEILKPEDFGMSRYVHVGSRLTGWNAIKSRAEQLNLHLTDAQAKELTVRIKKLADVRTLAMDDVDRVLREYHADLSDADRITKEASA

SEQ ID NO: 50 - protein, 465 aa, Aspergillus niger
MCPGADHEPNGQANVANGNGNNGEHPGFTAVETRQNPHPSVSRNPYGHNVGVTDFLSNVSRFQIIESTLREGEQFANAFFDTEKKIEIAKALDEFGVDYIELTSPCASEQSRKDCEAICKLGLKAKILTHIRCHMDDARIAVETGVDGVDVVIGTSSYLREHSHGKDMTYIKNTAIEVIEFVKSKGIEIRFSSEDSFRSDLVDLLSIYSAVDKVGVNRVGIADTVGCASPRQVYELVRVLRGVVSCDIETHFHNDTGCAIANAYCALEAGATHIDTSVLGIGERNGITPLGGLMARMMVADPEYVKSKYRLEKLKDIEDLVAEAVEVNIPFNNYITGFCAFTHKAGIHAKAILNNPSTYEIINPADFGMSRYVHFASRLTGWNAIKSRAQQLKIEMTDDQYKECTAKIKALADIRPIAVDDADSIIRAYYRNLKLGENKPLLDLTADEQAQFAAKEKELAAQASA

SEQ ID NO: 51 - protein, 445 aa, Emericella nidulans
MCPGDHPGFTAVQTRQNPHPSRNPYGHNVGVTDFLSNVSRFKIIESTLREGEQFANAFFDTQKKIEIAKALDEFGVDYIELTSPCASEQSRLDCEAICKLGLKAKILTHIRCHMDDARVAVETGVDGVDVVIGTSSYLREHSHGKDMTYIKNTAIEVIEFVKSKGIEIRFSSEDSFRSDLVDLLSIYSAVDQVGVNRVGIADTVGCASPRQVYELIRVLRGVVSCDIETHFHNDTGCAIANAYCALEAGATHIDTSVLGIGERNGITPLGGLMARMMVADPQYVKSKYKLEKLKDIEDLVAEAVEVNIPFNNYITGFCAFTHKAGIHAKAILNNPSTYEIINPADFGMSRYVHFASRLTGWNAIKSRAQQLNVHMTDDQYKECTAKIKALADIRPIAIDDADSIIRAYYRNLSSGENKPLMDLTADEHAQFLAKEKELTESGTAL

SEQ ID NO: 52 - protein, 474 aa, Penicillium chrysogenum
MVLLPPSLPVCQLKVTAPEFPSNFYLDGDHSGFVGIETRQNPHPSASRNPYGHDAGVTDFLSNVSRFQIIESTLREGEQFANAFFDTAKKIEIAKALDDFGVDYIELTSPCASEQSRADCEAICKLGLKAKILTHIRCHMDDARIAVETGVDGVDVVIGTSSYLREHSHGKDMTYIKNAAIEVIEFVKSKGIEIRFSSEDSFRSDLVDLLSIYSAVDKVGVNRVGIADTVGCASPRQVYELVRVLRGVVGCDIETHFHNDTGCAIANAFCALEAGATHIDTSVLGIGERNGITPLGGLMARMMVADREYVKSKYKLEKLKEIEDLVAEAVEVNIPFNNYITGFCAFTHKAGIHAKAILNNPSTYEIINPADFGMSRYVHFASRLTGWNAIKSRAQQLKLEMTDTQYKECTAKIKAMADIRPIAVDDADSIIRAYHRNLKSGENKPLLDLTAEEQAAFAAKEKELLEAQAAGLPV

SEQ ID NO: 53 - protein, 446 aa, Yarrowia lipolytica
MCATDNAPAANAAPEKPSNVGVEVGHTGEQTNPYGANPADFLSNVSKFQLIESTLREGEQFASAFFDTETKIEIAKALDDFGVDYIELTSPAASEQSRSDCEAICKLGLKAKILTHIRCHMDDARLAVSTGVDGVDVVIGTSQFLRQYSHGKDMNYIAQSAVEVIEFVKSHGIEIRFSSEDSFRSDLVDLLNIYRTVDKIGVNRVGIADTVGCANPRQVYELVRTLKSVVSCDIECHFHNDTGCAIANAYTALEAGANLIDVSVLGIGERNGITSLGGLMARMIAADRDYVLSKYKLHKLRDLENLVADAVQVNIPFNNPITGFCAFTHKAGIHAKAILANPSTYEILNPADFGLTRYIHFANRLTGWNAIKSRVDQLNLHLTDAQCKDVTAKIKKLGDVRSLNIDDVDSIIREFHADVTSTPTVAATEGPAVEDEPAAKKAKTEE

SEQ ID NO: 54 - protein, 687 aa, Phanerochaete chrysosporium
IPQTVIEKVVQKYAVGLPGDKVVKAGDYVMIRPEHVMTHDNTGPVISKFKSIGATRIYNPKQVVFTLDHDVQNKSEKNLKKYATIEAFARTHGIDFYPAGRGIGHQVLVEEGYAFPHTLTVASDSHSNMYGGVGCVGTPIVRTDAAALWATGQTWWQVPRMVKVEFKGRLAPGVSGKDVIVALCGSFNKDEVLNAAIEFSGEGVQHLTVDERLTIANMTTEWGALVGVFPVDDVTLSWYERMLKKLELRTFSTPALGSSIPPPPEHPRINRARLDALRANNLRSDADAEYSSHLVFDLSTLVPYVSGPNSVKVANPLPKLEEAKIKINKAYLLSCTNARASDIAAAAAVIKGHKVHPDVQFYFAPASSEVQREAEQSGDWETLIGAGAKPLPAGCGPCIGLGTGLLEEGEVGISATNRNYKGRMGHPLAQAYLASPAVVAASAIKGYIAGPDSLDPSKLPPAGAPTFSIVNSPSSGAKASQKEPVLVGFPETFAGPLLFAPQDNLNTDGIYPGKYTYQDDITLERQAEVVMENYDPTFAQLDAHTKRGVVLVSGYNFGTGSSREQAATALKSAGIPIVIAGSFGDIFKRNAINNGLVCVESPELVADLTAQFAKDGKRGAGGKEGELTVNKGLSAEVKVVDGALHVTFPDGKTKTYTIQPVGASVQELWLCGGLEGYVLKAIQAENF

SEQ ID NO: 55 - protein, 721 aa, Schizosaccharomyces pombe
MDSGEMHHPYQAFSKVGKCEISQTNPSFSSGMRCLVRSADIQFKGICGLTRGFASFNKPPQTITEKIVQKFAQNIPENKYVRSGDYVTIKPKHCMSHDNSWPVALKFMGIGAKKVFDNRQIVCTLDHDVQNKSEANLRKYKNIESFAKGQGIDFYPAGRGIGHQIMVEQGYAMPGSMAVASDSHSNTYGGVGCLGTPIVRTDAAAIWATGQTWWQIPPIARVNLVGQLPKGLSGKDIIVSLCGAFNHDEVLNHAIEFYGEGLNSLSIESRLTIANMTTEWGALSGLFPTDEKLLAWYEDRLKFLGPNHPRVNRETLDAIKASPILADEGAFYAKHLILDLSTLSPAVSGPNSVKVYNSAATLEKKDILIKKAYLVSCTNGRLSDIHDAAETVKGKKVADGVEFYVGAASSEVEAAAQKNGDWQTLIDSGARTLPAGCGPCIGLGTGLLKDGEVGISATNRNFKGRMGSREALAYLASPAVVAASAIAGKIVAPEGFKNAVSLVSAVDITDKVNKQTASKSSTEAVDSETAIIDGFPSIVAGEIVFCDADNLNTDGIYPGRYTYRDDITKEEMAKVCMENYDSEFGKKTKKDDILVSGFNFGTGSSREQAATAILSRGIPLVVGGSFSDIFKRNSINNALLAIQLPDLVQKLRTAFANESKELTRRTGWHLKWDVRKSTVTVTTSDNKEMSWKIGELGNSVQSLFVRGGLEGWVKHEISKSN

SEQ ID NO: 56 - protein, 693 aa, Kluyveromyces lactis
MFRVQRLRMFSTSRALYAGQNMTEKIVQRHAVGLPEGKTVVSGDYVSIKPAHCMSHDNSWPVALKFMGLGASTIKNPRQVVNTLDHDVQNKSEKNLTKYKNIENFAKKHGIDFYPAGRGIGHQIMIEEGYAFPLTMTVASDSHSNTYGGIGALGTPIVRTDAAAIWATGQTWWQIPPVAQVELKGELPAGISGKDIIVALCGVFNQDQVLNHAIEFTGDSLDKIPIDYRLTIANMTTEWGALSGLFPVDNVLLDFYRNRLTKVGNNHPRINEARINELQAKSDSLQADPDAKYAKKLIIDLSTLTHYVSGPNSVKISSTVDDLSKQDIKVNKAYLVSCTNSRLSDLESAANVVCPSGDINQVHKVAEGVEFYIAAASSEVEAEARATGAWQKLLNAGCLPLPAGCGPCIGLGTGLLEEGQVGISATNRNFKGRMGSKDALAYLASPSVVAASAILGKIGSPAEVLGTKDPNFTGVVATVEDAPATSADGKDVADESGASGSVEILEGFPSEISGELVLCDADNINTDGIYPGKYTYQDDVPKETMAKVCMENYDPDFQTKANPGDILISGFNFGTGSSREQAATAILAKGIKLVVSGSFGNIFFRNSINNALLTLEIPALINMLRDRYKDAPKELTRRTGWFLKWDVSQAKVYVTEGSVNGPIVLEQKVGELGKNLQEIIVKGGLESWVKSQL

SEQ ID NO: 57 - protein, 693 aa, Saccharomyces cerevisiae
MLRSTTFTRSFHSSRAWLKGQNLTEKIVQSYAVNLPEGKVVHSGDYVSIKPAHCMSHDNSWPVALKFMGLGATKIKNPSQIVTTLDHDIQNKSEKNLTKYKNIENFAKKHHIDHYPAGRGIGHQIMIEEGYAFPLNMTVASDSHSNTYGGLGSLGTPIVRTDAAAIWATGQTWWQIPPVAQVELKGQLPQGVSGKDIIVALCGLFNNDQVLNHAIEFTGDSLNALPIDHRLTIANMTTEWGALSGLFPVDKTLIDWYKNRLQKLGTNNHPRINPKTIRALEEKAKIPKADKDAHYAKKLIIDLATLTHYVSGPNSVKVSNTVQDLSQQDIKINKAYLVSCTNSRLSDLQSAADVVCPTGDLNKVNKVAPGVEFYVAAASSEIEADARKSGAWEKLLKAGCIPLPSGCGPCIGLGAGLLEPGEVGISATNRNFKGRMGSKDALAYLASPAVVAASAVLGKISSPAEVLSTSEIPFSGVKTEIIENPVVEEEVNAQTEAPKQSVEILEGFPREFSGELVLCDADNINTDGIYPGKYTYQDDVPKEKMAQVCMENYDAEFRTKVHPGDIVVSGFNFGTGSSREQAATALLAKGINLVVSGSFGNIFSRNSINNALLTLEIPALIKKLREKYQGAPKELTRRTGWFLKWDVADAKVVVTEGSLDGPVILEQKVGELGKNLQEIIVKGGLEGWVKSQL

SEQ ID NO: 58 - protein, 769 aa, Aspergillus niger
MQSRLLPSGPGRRWISLRVPNTPQRRAFASTRFLFQDVFQSQLDDPSSAALFSSLQSSRAVPQTLTEKIVQKYAVGLPDGKFVKSGDYVTIAPHRIMTHDNSWPVALKFMSIGASKMHDPNQVVMTLDHDVQNKTEKNLQKYRQIEEFAKQHGVEFYPAGRGIGHQIMVEEGFAWPGTLVVASDSHSNTYGAVASVGTPIVRTDAASIWATGKTWWQIPPVAKVTFTGILPPGVTGKDVIVALCGLFDKDDVLNHAIEFTGSEETMRSLPMDSRLTIANMTTEWGALSGLFPMDGVLKGWLKGKATTAAMGLADGPFKTLAARNFTHPAIEQLFVNPLTADKGAKYAKELFLDLSTLSPYVSGPNSVKIATPLKELEAQDIKVDKAYLVSCTNSRASDIAAAAKVFKDAAEKNGGKVPKIADGVKFYIAAASIPEQLAAEGAGDWQTLLEAGATALPAGCGPCIGLGTGLLEPGEVGISASNRNFKGRMGSTEAKAYLGSPEIVAASALSGKLSGPGWYQPPEGWTEVVRGEGDGIREEDRMLNTEQALEKLLGQLDDLVADGEKRFAPEEKVEEEGGLTEVYPGFPERVSGEIVFCDADNLNTDAIYPGYWTYQDNVPVEKMAEVCMSNYDKEFASIAKEGDILVVGYNFGCGSSREQAATALLAKQIPLVVSGSFGNIFSRNSINNALMGLEVPRLVSRLREEFGDKQLTRRTGWTLTWDVRRSQIEIQEGQNGPKWTHKVGELPPNVQEIIAKGGLEKWVKNAIEA

SEQ ID NO: 59 - protein, 776 aa, Emericella nidulans
MQSRLVSQSGLGRRWAVLRCALSKTYQRRTLTSTRRQFQDVFQSQLEDPTSAALFSALNSSKAVPQTLTEKIVQKYSVGLPQGKFVKSGDYVTIQPHRCMTHDNSWPCALKFMSIGASRLHNPDQIVMTLDHDVQNKSDKNLKKYRQIEEFATQHGVEFYPAGRGIGHQIMIEEGFAWPGTLAVASDSHSNMYGGVGCLGTPIVRTDAASVWATGKTWWQIPPVAKVTFKGVLPPGVTGKDVIVALCGLFNKDDVLNHAIEFTGSEETMRSLSVDTRLTIANMTTEWGALSGLFPIDSVLKGWLRGKATTAAMGLADGPFKTRAAERFTHPLLEQLFENPLTADKGAKYAKELFLDLSSLSPYVSGPNSVKVATPLKELEAQNIKVDKAYLVSCTNSRASDIAAAAKVFKEAAEKNGGKIPKIADGVKFYIAAASIPEQLAAEGNGDWQTLLEAGATQLPAGCGPCIGMGQGLLEPGEVGISASNRNFKGRMGSTEAKAYLGSPEVVAASALSGKLSGPGWYQTPEGWTEVIRGEGDGIREEDRMLTNEEALEKIIGQLDDLVADGEKRFASETPAVEESEQGLTEIYPGFPERVSGELVFCDADNVNTDGIYPGKYTYQDDVPPETMARVCMENYDPEFSTTAKEGDILVSGFNFGCGSSREQAATAILAKKIPLVVSGSFGNIFSRNSINNALMGLEVPRLVNRLRETFGSGDKVLTRRTGWTLTWDVRKSQIEVQEGPGGPKWTHKVGELPPNVQEIIAKGGLEKWVKNAIGA

SEQ ID NO: 60 - protein, 774 aa, Penicillium chrysogenum
MPSAESGPKTLYDKVFQDHIVNEQEDGTCLIYIDRHLVHEVTSPQAFEGLKNASRQVRRPDCTLATVDHNIPTSSRKNFKNAADFIKENDSRLQCTTLEENVKDFGLTYFGMGDKRQGIVHIIGPEQGFTLPGTTVVCGDSHTSTHGAFGALAFGIGTSEVEHVLATQTLITRRSKNMRIQVDGELPAGVTSKDVVLHIIGVIGTAGGNGAVIEFCGSVIRGLSMEARMSMCNMSIEGGARAGMIAPDEITFEYLKGRPLAPKYGSAEWNKATSYWSSLKSDAGAKYDSEVFIDGKDIIPTISWGTSPQDVVPITGVVPSPDDFEDENRKASCKRALEYMGLVSGTPMKDVVVDKVFIGSCTNARIEDLRAAAKVVNGRKVASNIKRAMIVPGSGLVKEQAESEGLDKVFTDAGFEWREAGCSMCLGMNPDILSPKERCASTSNRNFEGRQGAQGRTHLMSPAMAATAAIVGKLADVREHVVASPVLGKASPKIDVQPVFESPETEDELDRVLDRPADNEPHTNSSAPASGGGKSTGLPTFTTLKGIAAPLDRANVDTDAIIPKQFLKTIKRTGLGTALFYELRYTDDKENPDFVLNQGIYRDSKILVVTGPNFGCGSSREHAPWALLDFGIKCIIAPSFADIFFNNTFKNGMLPVVVSDEVALQKIADEARAGREVEVDLVNQEIKDAQGNKITSFEVEAFRKHCLINGLDDIGLTLQMESKIRSFESKRTLDTPWLDGSAYLRRDRRGATMVEAAPVPKTNRGDVKNEPLEW

SEQ ID NO: 61 - protein, 785 aa, Penicillium chrysogenum
MSPCSMLLKRVARPPVSTTCRLVRPRWAPSFGVPSRTIHHPLRSVSKSLSTRALSTTAPARVEGFHSQHENASIPFSETPSEKRTPQTLTEKIVQRYAVGLPEGKLVRSGDYISLAPGYCMTHDNSWPVALKFMSMGATKIHRPEQIVMTLDHDVQNTSAANLKKYEQIETFAGQHGIDFYPAGRGIGHQVMVEEGYAWPGTMAVASDSHSNHYGGVGCLGTAVVRTDAASIWATSRTWWQIPPVARVTFTGTLPAGVTGKDVIVALCGLFNSDVLNHAIEFTGSEETMESLLVDSRLTIANMTTEWGALTGLFPIDRTLKRWLRYKATEAAMSEDRTTRQRITHERIDELFANPLTADPDAQYAKQLYLNLSTLSPYVSGPNSVKVATPLNELAQQNIKVNRAYIVSCTNSRASDLAAAAKVFKDAAKANPGTTPKIADGVKLYIAAASAPEQEAAESTGDWQALLDAGAQPLPAGCGPCIGLGTGLLEPGEVGISASNRNFKGRMGSRDALAYLASPEVVAASALSGVISGPGAYQVPENWSGVEHGFGTGLPPTTENELTNLLQQMESLIDRVESAGEDSKPATEILPGFPERISGEIVFLDADNLDTDNIYPGKLTYQDNVSKDDMAAACMQNYDPEFKGIAKPSDILVAGFNFGCGSSREQAATAILAKQIPLVVAGSFGNIFSRNSINNALMGLEVPRLIERLRASFAQPPPGDAGRQLTRRTGWTLTWDVKRSVVEVKEGESGESWTEQVGELPANVQEIIAEGGLEAWVKGKVAKSE

SEQ ID NO: 62 - protein, 360 aa, Phanerochaete chrysosporium
MAFRLPLRRALSTAAASRSSLKIGLVPADGIGREVIPAARQAIEALGSDIPKPEFVDLLAGFELFTRTGTALPEETVQALKECDCALFGAVSSPSRRVTGYSSPIVALRKILDLYANVRPVVAPTPEEKPNVDLIVVRENTECLYVKQEQMTPTENGREARATRVITERASRRIGQMAFELAKARPRKHVTIIHKSNVLSITDGLFRETVRSVPRLNEGKYDDVEIAEQLVDSAVYRLFREPHIYDVMVAPNLYGDIISDAAAALVGSLGLVPSVNAGDNFVMGEPVHGSAPDIAGQGIANPIASIRSAALMLRHLGYGAPADRLDKAVDEVIREGQILTPDLGGKSKTQDVVDAVLKRI

SEQ ID NO: 63 - protein, 362 aa, Schizosaccharomyces pombe
MSATRRIVLGLIPADGIGKEVVPAARRLMENLPAKHKLKFDFIDLDAGWGTFERTGKALPERTVERLKTECNAALFGAVQSPTHKVAGYSSPIVALRKKMGLYANVRPVKSLDGAKGKPVDLVIVRENTECLYVKEERMVQNTPGKRVAEAIRRISEEASTKIGKMAFEIAKSRQKIRESGTYSIHKKPLVTIIHKSNVMSVTDGLFRESCRHAQSLDPSYASINVDEQIVDSMVYRLFREPECFDVVVAPNLYGDILSDGAASLIGSLGLVPSANVGDNFVMSEPVHGSAPDIAGRGIANPVATFRSVALMLEFMGHQDAAADIYTAVDKVLTEGKVLTPDLGGKSGTNEITDAVLANIHN

SEQ ID NO: 64 - protein, 360 aa, Emericella nidulans
MAAARTLRIGLIPGDGIGREVIPAGRRILEALPASLNLKFNFVDLDAGYDCFKRTGTALPDKTVEVLKKECDGALFGAVSSPSTKVAGYSSPIVALRKKLDLFANVRPVKTTAGTSAGKPIDLVIVRENTEDLYVKEESTEETPNGKVARAIKQISERASSRIATIAGEIALRRQNIRDGAAASGLRTKPMVTITHKSNVLSQTDGLFRETARAALAAQKFSSVEVEEQIVDSMVYKLFRQPEYYDVIVAPNLYGDILSDGAAALVGSLGLVPSANVGDNFAIGEPCHGSAPDIEGKNIANPIATLRSVALMLEFLGEEQAAAKIYAAVDGNLDEGKYLSPDMGGKATTTEVLEDVLKRL

SEQ ID NO: 65 - protein, 359 aa, Penicillium chrysogenum
MAAARTLRIGLIPGDGIGREVIPAGRRILESLPSSLNLKFSFVDLDAGYETFQKTGTALPDKTVDTLKKECDGALFGAVSSPSTKVAGYSSPIVALRKKLDLYANVRPVKTTAGNSNGKPIDLVIVRENTEDLYVKEERTIEGPNGKVAEAIKRISEKASFRISNIAGEIALRRQNIRAASPTSTRDQPMVTITHKSNVLSQTDGLFRETARRALSAEKFSSVFVEEQIVDSMVYKLFRQPEFYDVIVAPNLYGDILSDGAAALVGSLGLVPSANVGDGFAIGEPCHGSAPDIEGKGISNPIATIRSVALMLEFLGEEKAAAQIYAAVDGNLDAAQFLTPDMGGKATTQQVLDDVLKRL

SEQ ID NO: 66 - protein, 371 aa, Saccharomyces cerevisiae
MFRSVATRLSACRGLASNAARKSLTIGLIPGDGIGKEVIPAGKQVLENLNSKHGLSFNFIDLYAGFQTFQETGKALPDETVKVLKEQCQGALFGAVQSPTTKVEGYSSPIVALRREMGLFANVRPVKSVEGEKGKPIDMVIVRENTEDLYIKIEKTYIDKATGTRVADATKRISEIATRRIATIALDIALKRLQTRGQATLTVTHKSNVLSQSDGLFREICKEVYESNKDKYGQIKYNEQIVDSMVYRLFREPQCFDVIVAPNLYGDILSDGAAALVGSLGVVPSANVGPEIVIGEPCHGSAPDIAGKGIANPIATIRSTALMLEFLGHNEAAQDIYKAVDANLREGSIKTPDLGGKASTQQVVDDVLSRL

SEQ ID NO: 67 - protein, 369 aa, Kluyveromyces lactis
MMRTRFIQLSRRAYASNAKNLTIGLIPGDGIGKEVIPAGKKILESLNPKYGLSFKFIDLQAGWETFQNTGKALPDETIDILKNQCEGALFGAVQSPTTKVEGYSSPIVALRKNLGLFANVRPVKSVDGTKDRKVDLVIVRENTEDLYIKLEKSYIDEATGTRVADATKRITEIATKNIATIALQIAQQRLEQNGHATLTVTHKSNVLSQSDGLFREVCRETYEANKDKYGGVQYNEQIVDSMVYRMFREPECFDVVVAPNLYGDILSDGAAALVGSLGVVPSANVGPNIVIGEPCHGSAPDIAGKGISNPIATIRSTALMLEFLGYPEPAKDIHKAVDANIREGKYLTPDLGGNSTTQQVLEDVLSKLD

SEQ ID NO: 68 - protein, 536 aa, Penicillium chrysogenum
MSPPTALDVNLVGVTDTSTVPVPEPLTVNGVSAWREKTAKVPTGVAAACNSDMFKSPICYTKPKAKQFEHRFSLEAKSRKASTLKTAARYLKTPGLISLGGGLPSPEYFPFEHLDIKVPTAPGFSPEATRESGTVLRAGKHDIQEGTSTYDLEIALNYGQATGAAPLLRFVTEHTEIIHSPPYSDWQCTLTAGSTYAWDTALRVFCERGDYILMEEYTFASAAETAFPLGIKVAGIPMDEQGLIPEAMDKILGDWDVAARGARKPHVLYTIPTGQNPTGATQSAERRHAVYKVAQKHDLIIVEDEPYYFLQMQPYTSGDASPVPPPSSHEEFINSLVPSFLSMDTDGRVVRLESFSKVISPGSRVGWIVASEQIIERFIRNFEVSSQNPSGIAQIALFKLLDEHWGHSGYLDWLINLRMSYTARRDSLVHACEKHLPREIVHWEAPAAGMFQWMSIDWRKHPGIAAGKTHADIEEEIFLSAVNGGVLLSRGSWFKPDHDTVEEKMFFRATFAAASSEKIDEAISRFAQSLRAQFGL

SEQ ID NO: 69 - protein, 376 aa, Thermus thermophilus
MREWKIIDSTLREGEQFEKANFSTQDKVEIAKALDEFGIEYIEVTTPVASPQSRKDAEVLASLGLKAKVVTHIQCRLDAAKVAVETGVQGIDLLFGTSKYLRAAHGRDIPRIIEEAKEVIAYIREAAPHVEVRFSAEDTFRSEEQDLLAVYEAVAPYVDRVGLADTVGVATPRQVYALVREVRRVVGPRVDIEFHGHNDTGCAIANAYEAIEAGATHVDTTILGIGERNGITPLGGFLARMYTLQPEYVRRKYKLEMLPELDRMVARMVGVEIPFNNYITGETAFSHKAGMHLKAIYINPEAYEPYPPEVFGVKRKLIIASRLTGRHAIKARAEELGLHYGEEELHRVTQHIKALADRGQLTLEELDRILREWITA

SEQ ID NO: 70 - protein, 393 aa, Deinococcus radiodurans
MAGIFMTDAPPPLIPARSWAIIDSTLREGEQFARGNFGTDDKVEIARALDAFGAEYIEVTTPMVSEQTRQDIRKLTGLGLRAKFLTHVRCHMEDVQRAVDTGVDGLDLLFGTSSFLREFSHGKSIAQIIDTAGEVIGWIKTHHPELEIRFSAEDTFRSEEADLMAVYSAVSELGVHRVGLADTVGVATPRQVYTLVREVRKVIHEGCGIEFHGHNDTGCAVSNAYEAIEAGATHIDTTILGIGERNGITPLGGLLARMFTFDPQGLIDKYNLELLPELDRMIARMVDLPVPWNNYLTGEFAYNHKAGMHLKAIYLNPGAYEAIPPGVFGVGRRIQAASKVTGKHAIAYKARELGLHYGEDALRRVTDHIKSLAEQDELDDAHLEQVLREWVSA

SEQ ID NO: 71 - protein, 389 aa, Deinococcus geothermalis
MTPDSSTPLIPARSWAIIDSTLREGEQFARGNFKTGDKIEIARLLDAFGAEFLEVTTPMVGAQTQADIRRLTSLGLNAKILTHVRCHLEDVQRAVDLGVDGLDLLFGTSSFLREFSHGKSIAQIIDTASEVIGWIKQNHPDLEIRFSAEDTFRSEEADLMAVYRAVSDLGVHRVGLADTVGVATPRQVYTLVREVRKVIHAECGIEFHGHNDTGCAVSNAYEAIEAGATHIDTTILGIGERNGITPLGGFLARMFTFDPQGLIDKYNLELLPELDRLIARLVDLPIPWNNYLTGEFAYNHKAGMHLKAIYLNPGAYEAIPPSVFGVGRRIQAASKVTGKHAIAHKARELGLHYGEDALRRVTDHIKALAEEGELDDAHLEQVLREWVRA

SEQ ID NO: 72 - protein, 553 aa, Sulfolobus solfataricus
MALKMKYDFLLLSLKLLNLPIIFHLCSVSKKSVEVLDTTLRDGSQGANISFTLNDKIKIALLLDELGVDYIEGGWPGSNPKDEEFFREIKKYRLSKAKIAAFGSTKRKDVSVKEDISLNSIVKADVDVAVIFGKSWSLHATEVLKVTKQDNLDIVYDSINYLKSHGLKVIFDAEHFYQGFKEDPEYALEVVKTAESAGADVIALADTNGGTPPFEVYEITKKVREVLQVKLGIHAHNDIGCAVANSLMAIKAGARHVQGTINGIGERTGNADLIQIIPTLILKMGLNALNGQESLRKLREVSRIVYEILGLPPNPYQPYVGDNAFAHKAGVHVDAVMKVPRAYEHVDPSLVGNDRKFVISELSGTANLVSYLQGLGIAVDKKDERLKKALNKIKELEARGYSFDVGPASAILITLKELNIYKNYINLEYWKVINENNGLSIGIVKVNSQLEVAEGVGPVNAIDRALRMALQRVYPEIGEVKLIDYRVILPSEIKNTESVVRVTIEFTDNKMNWRTEGVSKSVVEASVMALVDGLDYYLQLKKTLKTAVDNYIV

SEQ ID NO: 73 - protein, 361 aa, Thermococcus kodakarensis
MVLDSTLREGEQTPGVNFSPEDRLRIGIALDEVGVDFIEAGHPAVSGEILEGIRLLASHGLNANILAHSRALRSDIDLVLKAEAEWIGIFMCLSQRCLERRFRTDLSGALTRVEDAILYAKDHGLKIRFTPEDTTRTEWKNLTAALNLARELKVDRVSIADTTGAAHPLEFYDLVKRVVEFGIPVNVHCHNDLGLALANAIMGIEAGATLVDATVNGIGERAGIVDLSHLLAALYYHYGVKKYRLEKLYSLSRLVSEITGLQVQVNYPIVGQNAFTHKAGLHVSAVVRDPSFYEFLPAETFGRERTIYVDRFAGRETIRFHLSRFGIHDEEIIEELLRRVKASRRPFTPEMLAEEARRMMT

SEQ ID NO: 74 - protein, 361 aa, Pyrococcus horikoshii
MILDSTLREGEQTPGVNYSPEQRLRIALALDEIGVDFIEVGHPAVSKDVFIGIKLIASQDLNANLLAHSRALLEDIDYVIQADVEWVGIFFCLSNACLRKRFRMSLSQALERISKAIEYAKDHGLKVRFTPEDTTRTEWENLRRAIELAKELKVDRISVADTTGGTHPLRFYTLVKKVVNFGIPVNVHCHNDLGLALANAIMGIEGGATVVDATVNGLGERAGIVDLAQIVTVLYYHYGVKKYRLDKLYEISRMVSEITGIALQPNYPIVGENAFTHKAGLHVSAVLKDPRFYEFLPAEVFGRERTIYVDRFAGKDTIRYYLQKLGINDEEFVKVLLKRVKSSREPFTWDKFIEEVRRLKT

SEQ ID NO: 75 - protein, 385 aa, Azotobacter vinelandii
MASVIIDDTTLRDGEQSAGVAFNADEKIAIARALAELGVPELEIGIPSMGEEEREVMHAIAGLGLSSRLLAWCRLCDVDLAAARSTGVTMVDLSLPVSDLMLHHKLNRDRDWALREVARLVGEARMAGLEVCLGCEDASRADLEFVVQVGEVAQAAGARRLRFADTVGVMEPFGMLDRFRFLSRRLDMELEVHAHDDFGLATANTLAAVMGGATHINTTVNGLGERAGNAALEECVLALKNLHGIDTGIDTRGIPAISALVERASGRQVAWQKSVVGAGVFTHEAGIHVDGLLKHRRNYEGLNPDELGRSHSLVLGKHSGAHMVRNTYRDLGIELADWQSQALLGRIRAFSTRTKRRSPQPAELQDFYRQLCEQGNPELAAGGMA

SEQ ID NO: 76 - protein, 381 aa, Klebsiella pneumoniae
MERVLINDTTLRDGEQSPGVAFRTSEKVAIAEALYAAGITAMEVGTPAMGDEEIARIQLVRRQLPDATLMTWCRMNALEIRQSADLGIDWVDISIPASDKLRQYKLREPLAVLLERLAMFIHLAHTLGLKVCIGCEDASRASGQTLRAIAEVAQNAPAARLRYADTVGLLDPFTTAAQISALRDVWSGEIEMHAHNDLGMATANTLAAVSAGATSVNTTVLGLGERAGNAAAWKPSALGLERCLGVETGVHFSALPALCQRVAEAAQRAIDPQQPLVGELVFTHESGVHVAALLRDSESYQSIAPSLMGRSYRLVLGKHSGRQAVNGVFDQMGYHLNAAQINQLLPAIRRFAENWKRSPKDYELVAIYDELCGESALRARG

SEQ ID NO: 77 - protein, 381 aa, Pseudomonas stutzeri
MSIVIDDTTLRDGEQSAGVAFSAEEKLAIARALAQLGVPELEIGIPSMGEEECEVMRAIAGLALPVRLLAWCRLCDADLLAAGGTGVGMVDLSLPVSDLMLQHKLGRDRDWALREAARLVGAARDAGLEVCLGCEDASRADPEFIVRVAEVAQAAGARRLRFADTVGVMEPFAMHARFRFLAERLDLELEVHAHDDFGLATANTLAAVRGGATHINTTVNGLGERAGNAALEECALALKHLHGIDCGIDVRGIPSISALVEQASGRQVAWQKSVVGAGVFTHEAGIHVDGLLKHRRNYEGLNPDELGRSHSLVLGKHSGAHMVELSYRELGIELQQWQSRALLGCIRRFSTQTKRSPQSADLQGFYQQLCEQGLALAGGAA

SEQ ID NO: 78 - protein, 477 aa, Acinetobacter sp. NCIMB9871
MNYPNIPLYINGEFLDHTNRDVKEVFNPVNHECIGLMACASQADLDYALESSQQAFLRWKKTSPITRSEILRTFAKLAREKAAEIGRNITLDQGKPLKEAIAEVTVCAEHAEWHAEECRRIYGRVIPPRNPNVQQLVVREPLGVCLAFSPWNFPFNQAIRKISAAIAAGCTIIVKGSGDTPSAVYAIAQLFHEAGLPNGVLNVIWGDSNFISDYMIKSPIIQKISFTGSTPVGKKLASQASLYMKPCTMELGGHAPVIVCDDADIDAAVEHLVGYKFRNAGQVCVSPTRFYVQEGIYKEFSEKVVLRAKQIKVGCGLDASSDMGPLAQARRMHAMQQIVEDAVHKGSKLLLGGNKISDKGNFFEPTVLGDLCNDTQFMNDEPFGPIIGLIPFDTIDHVLEEANRLPFGLASYAFTTSSKNAHQISYGLEAGMVSINHMGLALAETPFGGIKDSGFGSEGGIETFDGYLRTKFITQLN

SEQ ID NO: 79 - protein, 473 aa, Brucella melitensis 16M
MRIGKMEMQTRYPDVKLFIDGTWRDGSRGETIEIFNPATDEVIGHIARATTADLDDALAAVDRGFEAWSKVSAFDRYKIMRRAADIFRSRGEEVARLLTMEQGKPLAEARIEAAAACDLIDWFAEEARRSYGRIVPPRQAYVMQAEVKEPVGPVAAFTPWNFPINQAVRKISAALAAGCSILLKAAEDTPAAPAELVRAFAEAGLPDGAINLVYGDPAEISAYLIPHPVIRKVSFTGSTQVGKQLAALAGLHMKRVTMELGGHAPVIIAADADVEQAIKVVSGSKFRNAGQVCISPTRFLIENSVYDQVVEGMAAYATSLKVGDGLEAGTTMGPLVNAKRVNAMERLVQDAREHKARVVTGGERIGNRGNFFEPTILADVPRDAAIMNEEPFGPVALLNRFDALDEALSEANRLNYGLAAYAFTGSSAKAARISSTVRSGMITINQLRSGPAGSALRRDQRFRLWNGRRCRRA

SEQ ID NO: 80 - protein, 530 aa, Acinetobacter baumannii
MRLIMLNITGQNFIAGQRSSAGSKFVLSYDAATDEALPYQFAQATPEEIDQAAQAAALAYPAFRQTTPEQRAVFLETIASEIDALDDQFIATVCQETALPEARIRGERGRTTGQLRLFAQVLRRGDYLGARIDLALPERQPLPRPDLRQYKIGVGPVAVFGASNFPLAFSTAGGDTASALAAGCPVIVKAHSGHMATAESIANAICSAIEKCAMPKGIFSMIYGQGVGEPLVKHPAIKAVGFTGSLKGGRALCDLAAARPEPIPVFAEMSSINPMILLPEALKVRGDKIATELSGSVVLGCGQFCTNPGLIIGIKSPEFSQFLDHFKAAMAQQPPQTMLNKGTLRSYEHGLKELLAHDKIEHLAGQPQQGPQAYPQLFKADVSLLLEHDEFLQEEVFGPTTIVIEVESAEQLALALNGLRGQLTASLIAEPQDFENFATLIPLLEEKAGRLLLNGYPTGVEVCDAMVHGGPYPATSDARGTSVGTLAIERYLRPVCYQNYPDHLLPLALQNANPLGIARLVNGEMSKAAL

SEQ ID NO: 81 - protein, 481 aa, Azospirillum brasilense
MANVTYTDTQLLIDGEWVDAASGKTIDVVNPATGKPIGRVAHAGIADLDRALAAAQSGFEAWRKVPAHERAATMRKAAALVRERADAIAQLMTQEQGKPLTEARVEVLSAADIIEWFADEGRRVYGRIVPPRNLGAQQTVVKEPVGPVAAFTPWNFPVNQVVRKLSAALATGCSFLVKAPEETPASPAALLRAFVDAGVPAGVIGLVYGDPAEISSYLIPHPVIRKVTFTGSTPVGKQLASLAGLHMKRATMELGGHAPVIVAEDADVALAVKAAGGAKFRNAGQVCISPTRFLVHNSIRDEFTRALVKHAEGLKVGNGLEEGTTLGALANPRRLTAMASVIDNARKVGASIETGGERIGSEGNFFAPTVIANVPLDADVFNNEPFGPVAAIRGFDKLEEAIAEANRLPFGLAGYAFTRSFANVHLLTQRLEVGMLWINQPATPWPEMPFGGVKDSGYGSEGGPEALEPYLVTKSVTVMAV

SEQ ID NO: 82 - DNA, 1350 bp, Bacillus weihenstephanensis
  CDS (1)..(1350)
gtgcaagcgacggagcaaacacaaagtttgaaaaaaacagatgaaaagtacctttggcatgcgatgagaggagcagcccctagtccaacgaatttaattatcacaaaagcagaaggggcatgggtgacggatattgatggaaaccgttatttagacggtatgtccggtctttggtgcgtgaatgttgggtatggtcgaaaagaacttgcaagagcggcgtttgaacagcttgaagaaatgccgtatttccctctgactcaaagtcatgttcctgctattaaattagcagaaaaattgaatgaatggcttgatgatgaatacgtcattttcttttctaacagtggatcggaagcgaatgaaacagcatttaaaattgctcgtcaatatcatcaacaaaaaggtgatcatggacgctataagtttatttcccgctaccgcgcttatcacggtaactcaatgggagctcttgcagcaacaggtcaagcacagcgaaagtataaatatgaaccactcgggcaaggattcctgcatgtagcaccgcctgatacgtatcgaaatccagaggatgttcatacactggcaagtgctgaggaaatcgatcgtgtcatgacatgggagttaagccaaacagtagccggtgtgattatggagccaatcattactgggggcggaattttaatgcctcctgatggatatatgggaaaagtaaaagaaatttgcgagaagcacggtgcgttgctcatttgtgatgaagttatatgtggatttggccggacagggaagccatttggatttatgaattatggcgtcaaaccagatatcattacaatggcaaaaggtattacaagtgcgtatcttcctttgtcagcaacagcagttagacgagaggtttatgaggcattcgtaggtagtgatgattatgatcgcttccgccatgtaaatacgttcggagggaatcctgctgcttgcgctttagctttgaagaatttagaaattatggagaatgagaaactcattgaacgttccaaagaattgggtgaacgactgttatatgagctagaggatgtaaaagagcatccaaacgtaggggatgttcgcggaaagggccttcttttaggcattgaactagtggaagataagcaaacaaaagaaccggcttccattgaaaagatgaacaaagtcatcaatgcttgtaaagaaaaaggtctaattattggtaaaaatggtgacactgtcgcaggttacaataatattttgcagcttgcacctccattaagcatcacagaggaagactttacttttatcgttaaaacaatgaaagaatgtttatcccgcattaacgggcagtaa

SEQ ID NO: 83 - protein, 449 aa, Bacillus weihenstephanensis
VQATEQTQSLKKTDEKYLWHAMRGAAPSPTNLIITKAEGAWVTDIDGNRYLDGMSGLWCVNVGYGRKELARAAFEQLEEMPYFPLTQSHVPAIKLAEKLNEWLDDEYVIFFSNSGSEANETAFKIARQYHQQKGDHGRYKFISRYRAYHGNSMGALAATGQAQRKYKYEPLGQGFLHVAPPDTYRNPEDVHTLASAEEIDRVMTWELSQTVAGVIMEPIITGGGILMPPDGYMGKVKEICEKHGALLICDEVICGFGRTGKPFGFMNYGVKPDIITMAKGITSAYLPLSATAVRREVYEAFVGSDDYDRFRHVNTFGGNPAACALALKNLEIMENEKLIERSKELGERLLYELEDVKEHPNVGDVRGKGLLLGIELVEDKQTKEPASIEKMNKVINACKEKGLIIGKNGDTVAGYNNILQLAPPLSITEEDFTFIVKTMKECLSRINGQ

SEQ ID NO: 84 - DNA, 1350 bp, Artificial Sequence
  B. weihenstephanensis KBAB4 aminotransferase codon-optimised gene
atgcaggctaccgaacaaacccaatctctgaaaaagactgacgaaaaatatctgtggcacgcgatgcgcggtgcagctccgtctccgaccaacctgattattaccaaagctgaaggcgcgtgggtgaccgacattgacggtaaccgttatctggatggcatgagcggcctgtggtgtgttaatgtcggttatggccgtaaggagctggcgcgcgcggcatttgaacaactggaagaaatgccgtacttcccgctgactcaaagccatgtgccggctatcaaactggcggaaaaactgaacgaatggctggacgacgaatacgtgattttcttctctaattctggctccgaagcaaacgaaaccgcattcaaaatcgcccgtcaatatcaccagcagaaaggtgaccacggccgctataaattcatcagccgttatcgtgcataccatggtaattctatgggtgcgctggctgctaccggtcaggctcagcgcaaatacaagtacgaaccgctgggtcagggttttctgcacgttgcaccaccggatacctaccgtaacccggaagacgtccacaccctggcttctgccgaagaaatcgatcgtgttatgacctgggagctgtcccagactgttgcgggtgttatcatggaacctattattaccggtggtggcattctgatgccgccggacggttatatgggtaaagtcaaggaaatctgcgaaaaacacggcgcgctgctgatctgcgatgaagttatctgtggcttcggtcgcaccggcaaaccatttggcttcatgaattatggcgtaaaacctgacattattaccatggctaaaggcattacttccgcttatctgccgctgagcgcgaccgcagttcgccgcgaagtttatgaagcgtttgttggttctgatgattacgaccgtttccgtcatgtaaacacgtttggcggtaacccagcggcatgtgcgctggcgctgaaaaacctggaaatcatggaaaacgaaaagctgatcgaacgtagcaaagaactgggtgaacgtctgctgtacgaactggaagatgtcaaagaacacccgaacgtgggcgatgttcgcggtaaaggcctgctgctgggtattgaactggttgaagacaaacagaccaaggaaccggcttccattgaaaagatgaacaaagtgattaacgcgtgcaaagagaaaggcctgatcattggtaagaacggtgataccgtggcaggttataacaacattctgcagctggcgccgcctctgagcatcactgaagaagatttcaccttcatcgtcaaaactatgaaggagtgcctgagccgcatcaatggtcagtaa

SEQ ID NO: 85 - DNA, 1371 bp, Pseudomonas aeruginosa
  CDS (1)..(1371)
atgaacagccaaatcaccaacgccaagacccgtgagtggcaggcgttgagccgcgaccaccatctgccgccgttcaccgactacaagcagttgaacgagaagggcgcgcggatcatcaccaaggccgaaggcgtctatatctgggacagcgagggcaacaagatcctcgatgcgatggccggcctctggtgcgtcaacgtcggctacggccgcgaggagctggtccaggccgccacccggcagatgcgcgagttgccgttctacaacctgttcttccagaccgcccacccgccggtggtcgagctggccaaggcgatcgccgacgtcgctccggaaggcatgaaccacgtgttcttcaccggctccggctccgaggccaacgacaccgtgctgcgtatggtccgccactattgggcgaccaagggccagccgcagaagaaagtggtgatcggccgctggaacggctaccacggctccaccgtcgccggcgtcagcctgggcggcatgaaggcgttgcatgagcagggtgatttccccatcccgggcatcgtccacatcgcccagccctactggtacggcgagggcggcgacatgtcgccggacgagttcggcgtctgggccgccgagcagttggagaagaagattctcgaagtgggcgaggaaaacgtcgccgccttcatcgccgagccgatccagggcgccggcggcgtgatcgtcccgccggacacctactggccgaagatccgcgagatcctcgccaagtacgacatcctgttcatcgccgacgaagtgatctgcggcttcggccgtaccggcgagtggttcggcagccagtactacggcaacgccccggacctgatgccgatcgccaagggcctcacctccggctacatccccatgggcggggtggtggtgcgcgacgagatcgtcgaagtgctcaaccagggcggcgagttctaccacggcttcacctattccggtcacccggtggcggccgccgtggccctggagaacatccgcatcctgcgcgaagagaagatcatcgagaaggtgaaggcggaaacggcaccgtatttgcagaaacgctggcaggagctggccgaccacccgttggtgggcgaagcgcgcggggtcggcatggtcgccgccctggagctggtcaagaacaagaagacccgcgagcgtttcaccgacaagggcgtcgggatgctgtgccgggaacattgtttccgcaacggtttgatcatgcgcgcggtgggcgacactatgattatctcgccgccgctggtgatcgatccgtcgcagatcgatgagttgatcaccctggcgcgcaagtgcctcgatcagaccgccgccgccgtcctggcttga

SEQ ID NO: 86 - protein, 456 aa, Pseudomonas aeruginosa
MNSQITNAKTREWQALSRDHHLPPFTDYKQLNEKGARIITKAEGVYIWDSEGNKILDAMAGLWCVNVGYGREELVQAATRQMRELPFYNLFFQTAHPPVVELAKAIADVAPEGMNHVFFTGSGSEANDTVLRMVRHYWATKGQPQKKVVIGRWNGYHGSTVAGVSLGGMKALHEQGDFPIPGIVHIAQPYWYGEGGDMSPDEFGVWAAEQLEKKILEVGEENVAAFIAEPIQGAGGVIVPPDTYWPKIREILAKYDILFIADEVICGFGRTGEWFGSQYYGNAPDLMPIAKGLTSGYIPMGGVVVRDEIVEVLNQGGEFYHGFTYSGHPVAAAVALENIRILREEKIIEKVKAETAPYLQKRWQELADHPLVGEARGVGMVAALELVKNKKTRERFTDKGVGMLCREHCFRNGLIMRAVGDTMIISPPLVIDPSQIDELITLARKCLDQTAAAVLA

SEQ ID NO: 87 - DNA, 70 bp, Artificial Sequence
  Primer
ggggacaagtttgtacaaaaaagcaggctaggaggaattaaccatgaacagccaaatcaccaacgccaag

SEQ ID NO: 88 - DNA, 49 bp, Artificial Sequence
  Primer
ggggaccactttgtacaagaaagctgggttcaagccaggacggcggcgg

SEQ ID NO: 89 - DNA, 849 bp, Bacillus subtilis
  CDS (1)..(849)
atgaaggttttagtcaatggccggctgattgggcgcagtgaagcatcaatcgatttggaagatcgcggttatcagtttggtgacggcatctatgaagtgatcagggtgtacaaaggagtattgttcggcttacgtgagcatgcagagcgttttttcagaagtgctgctgaaatcggaatttcactgccattcagtatagaagatctcgagtgggacctgcaaaagcttgtacaggaaaatgcggtcagtgagggagcggtatacattcagacaacaagaggtgtggccccgcgaaaacaccagtatgaagccggcctcgagccgcagactactgcctatacgtttacggtgaaaaaaccggagcaagagcaggcatacggagtggcggccattacagatgaggatcttcgctggttaagatgtgatatcaaaagtctgaatttactgtataatgtcatgacgaagcaaagggcctatgaagccggagcatttgaagccattttacttagggacggcgttgttacggagggtacatcctctaacgtttatgccgttatcaacggcacagtgcgaacacatccggctaatcggctcattctcaatggaattacacggatgaatattttaggactgattgagaagaatgggatcaaactggatgagactcctgtcagtgaagaagagttgaaacaggcggaagagatctttatttcgtcaacgacggcagaaattattccggtcgtgacgctcgatggacaatcgatcggaagcgggaaacccggaccggtgaccaaacagcttcaggctgcttttcaagaaagcattcaacaggctgctagcatttcataa

SEQ ID NO: 90 - protein, 282 aa, Bacillus subtilis
MKVLVNGRLIGRSEASIDLEDRGYQFGDGIYEVIRVYKGVLFGLREHAERFFRSAAEIGISLPFSIEDLEWDLQKLVQENAVSEGAVYIQTTRGVAPRKHQYEAGLEPQTTAYTFTVKKPEQEQAYGVAAITDEDLRWLRCDIKSLNLLYNVMTKQRAYEAGAFEAILLRDGVVTEGTSSNVYAVINGTVRTHPANRLILNGITRMNILGLIEKNGIKLDETPVSEEELKQAEEIFISSTTAEIIPVVTLDGQSIGSGKPGPVTKQLQAAFQESIQQAASIS

SEQ ID NO: 91 - DNA, 1347 bp, Bacillus subtilis
  CDS (1)..(1347)
atgactcatgatttgatagaaaaaagtaaaaagcacctctggctgccatttacccaaatgaaagattatgatgaaaaccccttaatcatcgaaagcgggactggaatcaaagtcaaagacataaacggcaaggaatactatgacggtttttcatcggtttggcttaatgtccacggacaccgcaaaaaagaactagatgacgccataaaaaaacagctcggaaaaattgcgcactccacgttattgggcatgaccaatgttccagcaacccagcttgccgaaacattaatcgacatcagcccaaaaaagctcacgcgggtcttttattcagacagcggcgcagaggcgatggaaatagccctaaaaatggcgtttcagtattggaagaacatcgggaagcccgagaaacaaaaattcatcgcaatgaaaaacgggtatcacggtgatacgattggcgccgtcagtgtcggttcaattgagctttttcaccacgtatacggcccgttgatgttcgagagttacaaggccccgattccttatgtgtatcgttctgaaagcggtgatcctgatgagtgccgtgatcagtgcctccgagagcttgcacagctgcttgaggaacatcatgaggaaattgccgcgctttccattgaatcaatggtacaaggcgcgtccggtatgatcgtgatgccggaaggatatttggcaggcgtgcgcgagctatgtacaacatacgatgtcttaatgatcgttgatgaagtcgctacaggctttggccgtacaggaaaaatgtttgcgtgcgagcacgagaatgtccagcctgatctgatggctgccggtaaaggcattacaggaggctatttgccaattgccgttacgtttgccactgaagacatctataaggcattctatgatgattatgaaaacctaaaaacctttttccatggccattcctatacaggcaatcagcttggctgtgcggttgcgcttgaaaatctggcattatttgaatctgaaaacattgtggaacaagtagcggaaaaaagtaaaaagctccattttcttcttcaagatctgcacgctcttcctcatgttggggatattcggcagcttggctttatgtgcggtgcagagcttgtacgatcaaaggaaactaaagaaccttacccggctgatcggcggattggatacaaagtttccttaaaaatgagagagttaggaatgctgacaagaccgcttggggacgtgattgcatttcttcctcctcttgccagcacagctgaagagctctcggaaatggttgccattatgaaacaagcgatccacgaggttacgagccttgaagattga

SEQ ID NO: 92 - protein, 448 aa, Bacillus subtilis
MTHDLIEKSKKHLWLPFTQMKDYDENPLIIESGTGIKVKDINGKEYYDGFSSVWLNVHGHRKKELDDAIKKQLGKIAHSTLLGMTNVPATQLAETLIDISPKKLTRVFYSDSGAEAMEIALKMAFQYWKNIGKPEKQKFIAMKNGYHGDTIGAVSVGSIELFHHVYGPLMFESYKAPIPYVYRSESGDPDECRDQCLRELAQLLEEHHEEIAALSIESMVQGASGMIVMPEGYLAGVRELCTTYDVLMIVDEVATGFGRTGKMFACEHENVQPDLMAAGKGITGGYLPIAVTFATEDIYKAFYDDYENLKTFFHGHSYTGNQLGCAVALENLALFESENIVEQVAEKSKKLHFLLQDLHALPHVGDIRQLGFMCGAELVRSKETKEPYPADRRIGYKVSLKMRELGMLTRPLGDVIAFLPPLASTAEELSEMVAIMKQAIHEVTSLED

SEQ ID NO: 93 - DNA, 1467 bp, Rhodobacter sphaeroides
  CDS (1)..(1467)
atgcccggttgcgggggcttgcccgggaatgaaccgaaatgcggacgagaggggaggtcggcgatgacgcggaatgacgcgacgaatgctgccggagcggtgggcgcggcgatgcgggatcacatcctcttgcctgcacaggaaatggcgaagctcggcaagtccgcgcagccggtgctgactcatgccgagggcatctatgtccataccgaggacggccgccgcctgatcgacgggccggcgggcatgtggtgcgcgcaggtgggctacggccgccgcgagatcgtcgatgccatggcgcatcaggcgatggtgctgccctatgcctcgccctggtatatggccacgagccccgcggcgcggctggcggagaagatcgccacgctgacgccgggcgatctcaaccggatctttttcaccacgggcgggtcgaccgcggtggacagcgcgctgcgcttctcggaattctacaacaacgtgctgggccggccgcagaagaagcgcatcatcgtgcgctacgacggctatcacggctcgacggcgctcaccgccgcctgcaccggccgcaccggcaactggccgaacttcgacatcgcgcaggaccggatctcgttcctctcgagccccaatccgcgccacgccggcaaccgcagccaggaggcgttcctcgacgatctggtgcaggaattcgaggaccggatcgagagcctcggccccgacacgatcgcggccttcctggccgagccgatcctcgcctcgggcggcgtcattattccgcccgcaggctatcatgcgcgcttcaaggcgatctgcgagaagcacgacatcctctatatctcggacgaggtggtgacgggcttcggccgttgcggcgagtggttcgcctcggagaaggtgttcggggtggtgccggacatcatcaccttcgccaagggcgtgacctcgggctatgtgccgctcggcggccttgcgatctccgaggcggtgctggcgcggatctcgggcgagaatgccaagggaagctggttcaccaacggctatacctacagcaatcagccggtggcctgcgccgcggcgcttgccaacatcgagctgatggagcgcgagggcatcgtcgatcaggcgcgcgagatggcggactatttcgccgcggcgctggcttcgctgcgcgatctgccgggcgtggcggaaacccggtcggtgggcctcgtgggttgcgtgcaatgcctgctcgacccgacccgggcggacggcacggccgaggacaaggccttcaccctgaagatcgacgagcgctgcttcgagctcgggctgatcgtgcgcccgctgggcgatctctgcgtgatctcgccgccgctcatcatctcgcgcgcgcagatcgacgagatggtcgcgatcatgcggcaggccatcaccgaagtgagcgccgcccacggtctgaccgcgaaagaaccggccgccgtctga

SEQ ID NO: 94 - protein, 488 aa, Rhodobacter sphaeroides
MPGCGGLPGNEPKCGREGRSAMTRNDATNAAGAVGAAMRDHILLPAQEMAKLGKSAQPVLTHAEGIYVHTEDGRRLIDGPAGMWCAQVGYGRREIVDAMAHQAMVLPYASPWYMATSPAARLAEKIATLTPGDLNRIFFTTGGSTAVDSALRFSEFYNNVLGRPQKKRIIVRYDGYHGSTALTAACTGRTGNWPNFDIAQDRISFLSSPNPRHAGNRSQEAFLDDLVQEFEDRIESLGPDTIAAFLAEPILASGGVIIPPAGYHARFKAICEKHDILYISDEVVTGFGRCGEWFASEKVFGVVPDIITFAKGVTSGYVPLGGLAISEAVLARISGENAKGSWFTNGYTYSNQPVACAAALANIELMEREGIVDQAREMADYFAAALASLRDLPGVAETRSVGLVGCVQCLLDPTRADGTAEDKAFTLKIDERCFELGLIVRPLGDLCVISPPLIISRAQIDEMVAIMRQAITEVSAAHGLTAKEPAAV

SEQ ID NO: 95 - DNA, 837 bp, Legionella pneumophila
  CDS (1)..(837)
atgagtatcgcatttgttaacggcaagtattgttgtcaatctgaagcaaaaatttcaatatttgatcgagggtttctttttggtgactcggtttatgaagtgctgcctgtttaccatgggcagccttactttgtagaccaacatcttgaccgattattctcaaatatgaaaaaaattaagatgattataccaaattatgattggcatggtttaattcatagactaatatcagaaaataatggcggtaatttacaagtatatatccaagtcacacgagggaatcaaggggtgcgcaagcatgatatccctacttccatcacaccttctgttatcgcattcactatgcataatccatttcccaccctcgaagataaggaacagggaatgtcagcaaaactggttgaagattttcggtggatgagatgtgatataaaaactacttctttaattgccaatatattactgaatgatgaggctgtatctgcaggattccacactgcaattcttgcccggaacggtctaattacagagggaagtagtaccaacgtatttattgtcgcacaggatggtgttattaagacaccacccatgaataatttctgtttaccaggaattactcggcaagttgttattgaaataattaaaaaattagatttaaagttcagagaaatagaaattagcatttcagagcttttttctgctcaggaagtttggataacaagtacgacaaaagaagtattccctattacaaagattaatgactctttgattaatggcggaaaagttggcgaatattggcggataattaatgattcctaccaacaactagtaaactaa

SEQ ID NO: 96 - protein, 278 aa, Legionella pneumophila
MSIAFVNGKYCCQSEAKISIFDRGFLFGDSVYEVLPVYHGQPYFVDQHLDRLFSNMKKIKMIIPNYDWHGLIHRLISENNGGNLQVYIQVTRGNQGVRKHDIPTSITPSVIAFTMHNPFPTLEDKEQGMSAKLVEDFRWMRCDIKTTSLIANILLNDEAVSAGFHTAILARNGLITEGSSTNVFIVAQDGVIKTPPMNNFCLPGITRQVVIEIIKKLDLKFREIEISISELFSAQEVWITSTTKEVFPITKINDSLINGGKVGEYWRIINDSYQQLVN

SEQ ID NO: 97 - DNA, 861 bp, Nitrosomonas europaea
  CDS (1)..(861)
atgatttacctcaatggcaaatttctgccgatggaacaggctaccgttccagtgctggatagaggcttcatcttcggtgatggtgtctatgaagtcataccggtttattcacgtaaaccgttccggctgggcgaacatctttcccggctgcagcacagtctggatggcatacgtctccagaatccgcacactgaagaacaatgggctggtctgatcgaacgcatcatcgagctgaatgaaggtgatgatcagtacctttacctgcacattacacgcggggtggcaaaacgtgaccatgcctttcctcgcgaagtaacgcccactgtcttcatcatgagcaacccgcttccggctccacctgcaaaattgctcgtttccggagtttcagcgattaccgccagggataatcgctgggggcgctgtgatatcaaagccatttcactgttgccaaatatcttattgcgccagcttgccgtggacgcacaagccatggaaacgatcctgttacgcgatggtctgttgaccgaaggggccgccagcaatattttcatcgtaaaagacgacctgctgctgaccccccccaaagatcaccgtatattgcctggcattacttatgatgtagtactggaactggctgaaacacatggtgttccacatgcgacaagagaaatatcagagcttgagttacgtactgcacgggaaatcatgctgacttcttccaccaaagaaattctcccgatcacacagctggatggacaaccgatcggtaatggcaccccagggccagtatttcagcaactggatcggctctatcaggcatataagctggaagtcatgcgcgggcatgctccacgccagtaa

SEQ ID NO: 98 - protein, 286 aa, Nitrosomonas europaea
MIYLNGKFLPMEQATVPVLDRGFIFGDGVYEVIPVYSRKPFRLGEHLSRLQHSLDGIRLQNPHTEEQWAGLIERIIELNEGDDQYLYLHITRGVAKRDHAFPREVTPTVFIMSNPLPAPPAKLLVSGVSAITARDNRWGRCDIKAISLLPNILLRQLAVDAQAMETILLRDGLLTEGAASNIFIVKDDLLLTPPKDHRILPGITYDVVLELAETHGVPHATREISELELRTAREIMLTSSTKEILPITQLDGQPIGNGTPGPVFQQLDRLYQAYKLEVMRGHAPRQ

SEQ ID NO: 99 - DNA, 1293 bp, Neisseria gonorrhoeae
  CDS (1)..(1293)
atgaggataaatatgaaccgtaacgaaattttattcgaccgcgccaaggccatcatccccggcggcgtgaattcgcccgtgcgcgcattcggcagcgtcggcggcgtgccgcgcttcatcaaaaaagccgaaggcgcgtatgtttgggacgaaaacggcacgcgctacaccgattatgtcggctcttgggggcctgcgattgtcggacacgcgcatcccgaagtcgtcgaagccgtgcgcgaagctgcgttgggcggtttgtcgttcggcgcgcccaccgaaggcgaaatcgccattgccgaacaaattgccgaaattatgccgtctgtcgaacggctgcgcctcgtcagctccggcacggaagcgacgatgactgccatccgtctggcacgcggttttaccggccgcgacaaaatcatcaaatttgaaggctgctaccacggccattccgacagcctgttggtgaaagcaggcagcggtctgcttaccttcggcaatccttcttccgccggtgtgcctgccgactttaccaaacatactttggtactcgaatacaacaacatcgcccaactcgaagaagcctttgcccaaagcggcgacgaaatcgcctgcgtgattgtcgaacccttcgtcggcaatatgaacctcgtccgcccgaccgaagcctttgtcaaagccttgcgcggattgaccgaaaaacacggcgcggtgttgatttacgacgaagtgatgaccggtttccgcgtcgcgctcggcggcgcgcagtcgctgcacggcatcacgcccgacctgaccacgatgggcaaagtcatcggcggcggtatgccgcttgccgcgttcggcggacgcaaagacatcatggaatgtatttccccgttgggcggcgtgtatcaggcaggtacattatcaggcaacccgattgccgtcgccgccggcttgaaaacgctggaaatcatccagcgcgaaggcttctatgaaaacctgaccgccttgacacaacgccttgccaacggtattgccgccgccaaagcgcacggtatcgagtttgccgccgacagcgtgggcggtatgttcggtctgtatttcgccgcacacgtgccgcgaaactatgccgatatggcgcgctccaatatcgacgctttcaaacgcttcttccacggcatgctcgaccgcggcattgccttcggcccgtccgcttatgaagcgggtttcgtttccgccgcgcatacgcccgagctgattgacgaaacggttgcggttgcggttgaagtgttcaaggcgatggctgcatga

SEQ ID NO: 100 - protein, 430 aa, Neisseria gonorrhoeae
MRINMNRNEILFDRAKAIIPGGVNSPVRAFGSVGGVPRFIKKAEGAYVWDENGTRYTDYVGSWGPAIVGHAHPEVVEAVREAALGGLSFGAPTEGEIAIAEQIAEIMPSVERLRLVSSGTEATMTAIRLARGFTGRDKIIKFEGCYHGHSDSLLVKAGSGLLTFGNPSSAGVPADFTKHTLVLEYNNIAQLEEAFAQSGDEIACVIVEPFVGNMNLVRPTEAFVKALRGLTEKHGAVLIYDEVMTGFRVALGGAQSLHGITPDLTTMGKVIGGGMPLAAFGGRKDIMECISPLGGVYQAGTLSGNPIAVAAGLKTLEIIQREGFYENLTALTQRLANGIAAAKAHGIEFAADSVGGMFGLYFAAHVPRNYADMARSNIDAFKRFFHGMLDRGIAFGPSAYEAGFVSAAHTPELIDETVAVAVEVFKAMAA

SEQ ID NO: 101 - DNA, 924 bp, Pseudomonas aeruginosa
  CDS (1)..(924)
atgtcgatggccgatcgtgatggcgtgatctggtatgacggtgaactggtgcagtggcgcgacgcgaccacgcacgtgctgacccataccctgcactatggaatgggcgtgttcgagggcgtgcgcgcctacgacaccccgcagggcacggcgatcttccgcctgcaggcgcataccgaccggctgttcgactccgcgcacatcatgaacatgcagatcccgtacagccgcgacgagatcaacgaggcgacccgcgccgccgtgcgcgagaacaacctggaaagcgcctatatccgcccgatggtgttctacggaagcgaaggcatgggcctgcgcgccagcggcctgaaggtccatgtgatcatcgccgcctggagctggggcgcctacatgggcgaggaagccctgcagcaaggcatcaaggtgcgcaccagttccttcacccgccaccacgtcaacatctcgatgacccgcgccaagtccaacggcgcctacatcaactcgatgctggccctccaggaagcgatctccggcggcgccgacgaggccatgatgctcgatccggaaggctacgtggccgaaggctccggcgagaacatcttcatcatcaaggatggcgtgatctacaccccggaagtcaccgcctgcctgaacggcatcactcgtaacactatcctgaccctggccgccgaacacggttttaaactggtcgagaagcgcatcacccgcgacgaggtgtacatcgccgacgaggccttcttcactggcactgccgcggaagtcacgccgatccgcgaagtggacggtcgcaagatcggcgccggccgccgtggcccggtcaccgaaaagctgcagaaagcctatttcgacctggtcagcggcaagaccgaggcccacgccgagtggcgtaccctggtcaagtaa

SEQ ID NO: 102 - protein, 307 aa, Pseudomonas aeruginosa
MSMADRDGVIWYDGELVQWRDATTHVLTHTLHYGMGVFEGVRAYDTPQGTAIFRLQAHTDRLFDSAHIMNMQIPYSRDEINEATRAAVRENNLESAYIRPMVFYGSEGMGLRASGLKVHVIIAAWSWGAYMGEEALQQGIKVRTSSFTRHHVNISMTRAKSNGAYINSMLALQEAISGGADEAMMLDPEGYVAEGSGENIFIIKDGVIYTPEVTACLNGITRNTILTLAAEHGFKLVEKRITRDEVYIADEAFFTGTAAEVTPIREVDGRKIGAGRRGPVTEKLQKAYFDLVSGKTEAHAEWRTLVK

SEQ ID NO: 103 - DNA, 1407 bp, Rhodopseudomonas palustris
  CDS (1)..(1407)
atgaagctgataccgtgccgcgcctttcaccccccggccgcgcagtgcatgaggagcgccatgttagacaagatcaagcccacgtccgccgtcaacgcgccgaacgatctcaacgcgttctggatgccgttcaccgcgaaccgggccttcaagcgcgcgccgaagatggtcgtgggtgccgaaggcatgcactacatcaccgccgatggtcgcaagatcatcgacgccgcctcgggcatgtggtgcaccaatgcgggccatggccgcaaggaaatcgccgaggcgatcaaggcgcaggccgatgaactcgacttctcgccgccgttccagttcggccagccgaaggcgttcgaactcgccagccggatcgccgatctggcgccggaaggcctcgatcacgtgttcttctgcaattcgggctcggaagccggcgacaccgcgctgaagatcgcggtcgcctatcagcagatcaagggccagggctcacgcacccgcctgatcggccgcgagcgcggctatcacggcgtcggcttcggcggcaccgcggtcggcggcatcggcaacaaccgcaagatgttcggtccgctgctcaacggcgtcgatcatctgcctgcgacttatgatcgcgacaagcaggctttcaccatcggcgagccggaatacggcgcgcacttcgccgaagcgcttgaaggcctcgtcaatctgcacggcgccaacaccatcgcggcggtgatcgtcgagccgatggccggctccaccggcgtgctgccggcgccgaagggctatctcaagaagctgcgcgagatcaccaagaagcacggcatcctgctgatcttcgacgaggtcatcaccggctacggccgtctcggctatgccttcgcgtccgaacgttacggcgtcaccccggacatgatcaccttcgccaagggcgtcaccaatggtgcggtgccgatgggcggcgtgatcacctcggcggagatccacgatgcgttcatgaccggccccgagcacgcggtcgagctggcgcacggctacacctattcggcgcatccgctcgcctgcgcggccggcatcgccaccctcgacatctaccgcgacgagaagctgttcgagcgcgccaaggcgctggagccgaagtttgccgaggcggtgatgtcgctgaagtcggccccgaacgtggtcgacatccgcaccgtcggcctgacggcgggtatcgacctcgcttcgatcgccgatgcggtcggcaagcgtggcttcgaagcgatgaatgccggcttccacgaccacgagctgatgctgcggatcgccggcgacaccctggcgctgaccccgccgctgatcctcagcgaggaccacatcggtgagatcgtcgacaaggtcggcaaggtgatccgcgcggtcgcctga

SEQ ID NO: 104 - protein, 468 aa, Rhodopseudomonas palustris
MKLIPCRAFHPPAAQCMRSAMLDKIKPTSAVNAPNDLNAFWMPFTANRAFKRAPKMVVGAEGMHYITADGRKIIDAASGMWCTNAGHGRKEIAEAIKAQADELDFSPPFQFGQPKAFELASRIADLAPEGLDHVFFCNSGSEAGDTALKIAVAYQQIKGQGSRTRLIGRERGYHGVGFGGTAVGGIGNNRKMFGPLLNGVDHLPATYDRDKQAFTIGEPEYGAHFAEALEGLVNLHGANTIAAVIVEPMAGSTGVLPAPKGYLKKLREITKKHGILLIFDEVITGYGRLGYAFASERYGVTPDMITFAKGVTNGAVPMGGVITSAEIHDAFMTGPEHAVELAHGYTYSAHPLACAAGIATLDIYRDEKLFERAKALEPKFAEAVMSLKSAPNVVDIRTVGLTAGIDLASIADAVGKRGFEAMNAGFHDHELMLRIAGDTLALTPPLILSEDHIGEIVDKVGKVIRAVA

SEQ ID NO: 105 - DNA, 1263 bp, Escherichia coli
  CDS (1)..(1263)
atgccacattcactgttcagcaccgataccgatctcaccgccgaaaatctgctgcgtttgcccgctgaatttggctgcccggtgtgggtctacgatgcgcaaattattcgtcggcagattgcagcgctgaaacagtttgatgtggtgcgctttgcacagaaagcctgttccaatattcatattttgcgcttaatgcgtgagcagggcgtgaaagtggattccgtctcgttaggcgaaatagagcgtgcgttggcggcgggttacaatccgcaaacgcaccccgatgatattgtttttacggcagatgttatcgatcaggcgacgcttgaacgcgtcagtgaattgcaaattccggtgaatgcgggttctgttgatatgctcgaccaactgggccaggtttcgccagggcatcgggtatggctgcgcgttaatccggggtttggtcacggacatagccaaaaaaccaataccggtggcgaaaacagcaagcacggtatctggtacaccgatctgcccgccgcactggacgtgatacaacgtcatcatctgcagctggtcggcattcacatgcacattggttctggcgttgattatgcccatctggaacaggtgtgtggtgctatggtgcgtcaggtcatcgaattcggtcaggatttacaggctatttctgcgggcggtgggctttctgttccttatcaacagggtgaagaggcggttgataccgaacattattatggtctgtggaatgccgcgcgtgagcaaatcgcccgccatttgggccaccctgtgaaactggaaattgaaccgggtcgcttcctggtagcgcagtctggcgtattaattactcaggtgcggagcgtcaaacaaatggggagccgccactttgtgctggttgatgccgggttcaacgatctgatgcgcccggcaatgtacggtagttaccaccatatcagtgccctggcagctgatggtcgttctctggaacacgcgccaacggtggaaaccgtcgtcgccggaccgttatgtgaatcgggcgatgtctttacccagcaggaagggggaaatgttgaaacccgcgccttgccggaagtgaaggcaggtgattatctggtactgcatgatacaggggcatatggcgcatcaatgtcatccaactacaatagccgtccgctgttaccagaagttctgtttgataatggtcaggcgcggttgattcgccgtcgccagaccatcgaagaattactggcgctggaattgctttaa

SEQ ID NO: 106 - protein, 420 aa, Escherichia coli
MPHSLFSTDTDLTAENLLRLPAEFGCPVWVYDAQIIRRQIAALKQFDVVRFAQKACSNIHILRLMREQGVKVDSVSLGEIERALAAGYNPQTHPDDIVFTADVIDQATLERVSELQIPVNAGSVDMLDQLGQVSPGHRVWLRVNPGFGHGHSQKTNTGGENSKHGIWYTDLPAALDVIQRHHLQLVGIHMHIGSGVDYAHLEQVCGAMVRQVIEFGQDLQAISAGGGLSVPYQQGEEAVDTEHYYGLWNAAREQIARHLGHPVKLEIEPGRFLVAQSGVLITQVRSVKQMGSRHFVLVDAGFNDLMRPAMYGSYHHISALAADGRSLEHAPTVETVVAGPLCESGDVFTQQEGGNVETRALPEVKAGDYLVLHDTGAYGASMSSNYNSRPLLPEVLFDNGQARLIRRRQTIEELLALELL

SEQ ID NO: 107 - DNA, 1265 bp, Artificial Sequence
  Escherichia.coli diaminopimelate decarboxylase LysA codon optimised gene
atatgccacactctctgttttctactgatactgatctgactgcggaaaacctgctgcgtctgccggctgaattcggttgtccggtatgggtgtacgacgctcagattattcgtcgccagatcgcagcactgaagcagttcgatgtagtgcgttttgcacagaaggcgtgctccaacatccatatcctgcgcctgatgcgtgagcagggcgttaaagttgactccgtctctctgggtgagattgagcgcgccctggcagccggctataacccacagacccatcctgacgacattgtatttactgccgacgtgatcgaccaggctactctggaacgcgtttctgaactgcagatcccggttaatgctggttctgtggacatgctggaccagctgggccaggtatccccaggtcatcgtgtgtggctgcgtgtcaacccaggtttcggccacggccactctcagaaaactaacactggtggtgagaactccaagcatggcatttggtataccgatctgccggctgcactggacgtaatccagcgtcaccacctgcagctggtgggcatccacatgcacattggctccggcgtagactacgcccacctggagcaagtctgcggtgctatggtacgtcaggtaatcgagttcggccaagatctgcaggcaatcagcgctggtggcggcctgtctgtaccttatcagcagggcgaggaggcggttgacactgagcactactacggtctgtggaacgccgctcgtgagcaaattgcacgtcacctgggccacccggtgaaactggagatcgagccgggccgcttcctggtagcacagtccggcgtactgattacccaggtacgctctgttaaacagatgggctcccgtcactttgtgctggtagacgcaggcttcaacgacctgatgcgtccggctatgtatggttcctatcatcacatctctgcgctggccgccgacggccgctctctggaacacgcgccgacggttgaaacggtggtggctggtccgctgtgcgagtccggcgacgttttcactcagcaggagggcggcaatgtagagacgcgtgcgctgccggaagtgaaagccggtgattatctggtgctgcatgataccggcgcctatggtgcgagcatgagcagcaactacaactctcgcccgctgctgccggaggtcctgttcgataacggccaagcccgcctgatccgtcgtcgtcagaccatcgaggaactgctggcactggagctgctgtaa

SEQ ID NO: 108 - DNA, 1692 bp, Saccharomyces cerevisiae
  CDS (1)..(1692)
atgtctgaaattactttgggtaaatatttgttcgaaagattaaagcaagtcaacgttaacaccgttttcggtttgccaggtgacttcaacttgtccttgttggacaagatctacgaagttgaaggtatgagatgggctggtaacgccaacgaattgaacgctgcttacgccgctgatggttacgctcgtatcaagggtatgtcttgtatcatcaccaccttcggtgtcggtgaattgtctgctttgaacggtattgccggttcttacgctgaacacgtcggtgttttgcacgttgttggtgtcccatccatctctgctcaagctaagcaattgttgttgcaccacaccttgggtaacggtgacttcactgttttccacagaatgtctgccaacatttctgaaaccactgctatgatcactgacattgctaccgccccagctgaaattgacagatgtatcagaaccacttacgtcacccaaagaccagtctacttaggtttgccagctaacttggtcgacttgaacgtcccagctaagttgttgcaaactccaattgacatgtctttgaagccaaacgatgctgaatccgaaaaggaagtcattgacaccatcttggctttggtcaaggatgctaagaacccagttatcttggctgatgcttgttgttccagacacgacgtcaaggctgaaactaagaagttgattgacttgactcaattcccagctttcgtcaccccaatgggtaagggttccattgacgaacaacacccaagatacggtggtgtttacgtcggtaccttgtccaagccagaagttaaggaagccgttgaatctgctgacttgattttgtctgtcggtgctttgttgtctgatttcaacaccggttctttctcttactcttacaagaccaagaacattgtcgaattccactccgaccacatgaagatcagaaacgccactttcccaggtgtccaaatgaaattcgttttgcaaaagttgttgaccactattgctgacgccgctaagggttacaagccagttgctgtcccagctagaactccagctaacgctgctgtcccagcttctaccccattgaagcaagaatggatgtggaaccaattgggtaacttcttgcaagaaggtgatgttgtcattgctgaaaccggtacctccgctttcggtatcaaccaaaccactttcccaaacaacacctacggtatctctcaagtcttatggggttccattggtttcaccactggtgctaccttgggtgctgctttcgctgctgaagaaattgatccaaagaagagagttatcttattcattggtgacggttctttgcaattgactgttcaagaaatctccaccatgatcagatggggcttgaagccatacttgttcgtcttgaacaacgatggttacaccattgaaaagttgattcacggtccaaaggctcaatacaacgaaattcaaggttgggaccacctatccttgttgccaactttcggtgctaaggactatgaaacccacagagtcgctaccaccggtgaatgggacaagttgacccaagacaagtctttcaacgacaactctaagatcagaatgattgaaatcatgttgccagtcttcgatgctccacaaaacttggttgaacaagctaagttgactgctgctaccaacgctaagcaataa

SEQ ID NO: 109 - protein, 563 aa, Saccharomyces cerevisiae
MSEITLGKYLFERLKQVNVNTVFGLPGDFNLSLLDKIYEVEGMRWAGNANELNAAYAADGYARIKGMSCIITTFGVGELSALNGIAGSYAEHVGVLHVVGVPSISAQAKQLLLHHTLGNGDFTVFHRMSANISETTAMITDIATAPAEIDRCIRTTYVTQRPVYLGLPANLVDLNVPAKLLQTPIDMSLKPNDAESEKEVIDTILALVKDAKNPVILADACCSRHDVKAETKKLIDLTQFPAFVTPMGKGSIDEQHPRYGGVYVGTLSKPEVKEAVESADLILSVGALLSDFNTGSFSYSYKTKNIVEFHSDHMKIRNATFPGVQMKFVLQKLLTTIADAAKGYKPVAVPARTPANAAVPASTPLKQEWMWNQLGNFLQEGDVVIAETGTSAFGINQTTFPNNTYGISQVLWGSIGFTTGATLGAAFAAEEIDPKKRVILFIGDGSLQLTVQEISTMIRWGLKPYLFVLNNDGYTIEKLIHGPKAQYNEIQGWDHLSLLPTFGAKDYETHRVATTGEWDKLTQDKSFNDNSKIRMIEIMLPVFDAPQNLVEQAKLTAATNAKQ

SEQ ID NO: 110 - DNA, 1692 bp, Artificial Sequence
  Saccharomyces cerevisiae pyruvate decarboxylase Pdc codon optimised gene
atgtccgagatcactctgggcaaatacctgtttgaacgtctgaaacaggtgaacgttaataccgtattcggcctgccgggtgatttcaacctgtccctgctggacaaaatctatgaagttgaaggtatgcgttgggctggcaacgctaacgagctgaacgcagcgtacgcggcagatggttacgctcgtatcaaaggtatgtcttgtatcatcaccaccttcggtgttggtgagctgagcgccctgaacggcatcgccggctcctatgcagagcacgtgggcgtgctgcacgttgtgggtgtaccgtccatcagcgcccaggcaaaacagctgctgctgcaccacaccctgggtaacggcgactttaccgttttccatcgtatgtctgcgaacatcagcgaaactactgcaatgattactgacatcgctacggcaccggcagaaatcgaccgttgcattcgtaccacgtacgttactcagcgcccggtttatctgggcctgccagccaacctggtggatctgaacgtcccggctaaactgctgcagactccgatcgatatgtctctgaaacctaacgacgcagaatctgagaaagaagttatcgatactattctggctctggtgaaagatgcaaagaacccagttatcctggctgacgcatgttgctctcgtcatgatgtaaaggcagaaaccaaaaagctgatcgacctgacgcagttcccggcgttcgttaccccgatgggcaagggttccatcgatgagcagcacccgcgttatggtggtgtatacgttggcacgctgtccaaaccggaggtaaaagaagcggttgaaagcgcagatctgatcctgtctgttggtgcactgctgagcgacttcaacaccggttctttctcctatagctacaagaccaaaaacattgtggagtttcactccgatcacatgaaaatccgcaacgcgacctttcctggtgtgcagatgaaattcgtactgcagaaactgctgaccaccatcgccgacgctgcgaaaggttataaaccggtagctgtgccggcacgtaccccggcgaacgccgcggttcctgcatccactccactgaagcaggaatggatgtggaatcagctgggtaatttcctgcaagaaggcgacgttgtaatcgcagaaaccggcactagcgcgtttggcattaaccagacgaccttcccaaacaacacctacggtatcagccaagtcctgtggggctctatcggcttcaccaccggtgcaaccctgggtgcggctttcgctgctgaggagatcgacccgaagaaacgtgttatcctgttcatcggtgacggctccctgcagctgaccgtccaggagatttctaccatgatccgctggggcctgaaaccgtacctgtttgtgctgaacaacgacggctacactattgagaaactgatccacggtccgaaagcacagtataatgagatccagggttgggatcatctgtctctgctgccgacctttggcgctaaagactacgagacccaccgcgtggctaccaccggcgagtgggataaactgacgcaggataaatccttcaatgacaatagcaagattcgtatgatcgaaatcatgctgccggtctttgatgctccgcagaacctggtagagcaagcaaaactgaccgcggcaactaacgctaaacagtaa

SEQ ID NO: 111 - DNA, 1707 bp, Zymomonas mobilis
  CDS (1)..(1707)
atgagttatactgtcggtacctatttagcggagcggcttgtccagattggtctcaagcatcacttcgcagtcgcgggcgactacaacctcgtccttcttgacaacctgcttttgaacaaaaacatggagcaggtttattgctgtaacgaactgaactgcggtttcagtgcagaaggttatgctcgtgccaaaggcgcagcagcagccgtcgttacctacagcgtcggtgcgctttccgcatttgatgctatcggtggcgcctatgcagaaaaccttccggttatcctgatctccggtgctccgaacaacaatgatcacgctgctggtcacgtgttgcatcacgctcttggcaaaaccgactatcactatcagttggaaatggccaagaacatcacggccgccgctgaagcgatttacaccccggaagaagctccggctaaaatcgatcacgtgattaaaactgctcttcgtgagaagaagccggtttatctcgaaatcgcttgcaacattgcttccatgccctgcgccgctcctggaccggcaagcgcattgttcaatgacgaagccagcgacgaagcttctttgaatgcagcggttgaagaaaccctgaaattcatcgccaaccgcgacaaagttgccgtcctcgtcggcagcaagctgcgcgcagctggtgctgaagaagctgctgtcaaatttgctgatgctctcggtggcgcagttgctaccatggctgctgcaaaaagcttcttcccagaagaaaacccgcattacatcggcacctcatggggtgaagtcagctatccgggcgttgaaaagacgatgaaagaagccgatgcggttatcgctctggctcctgtcttcaacgactactccaccactggttggacggatattcctgatcctaagaaactggttctcgctgaaccgcgttctgtcgtcgttaacggcattcgcttccccagcgtccatctgaaagactatctgacccgtttggctcagaaagtttccaagaaaaccggtgcattggacttcttcaaatccctcaatgcaggtgaactgaagaaagccgctccggctgatccgagtgctccgttggtcaacgcagaaatcgcccgtcaggtcgaagctcttctgaccccgaacacgacggttattgctgaaaccggtgactcttggttcaatgctcagcgcatgaagctcccgaacggtgctcgcgttgaatatgaaatgcagtggggtcacattggttggtccgttcctgccgccttcggttatgccgtcggtgctccggaacgtcgcaacatcctcatggttggtgatggttccttccagctgacggctcaggaagtcgctcagatggttcgcctgaaactgccggttatcatcttcttgatcaataactatggttacaccgccgaagttatgatccatgatggtccgtacaacaacatcaagaactgggattatgccggtctgatggaagtgttcaacggtaacggtggttatgacagcggtgctggtaaaggcctgaaggctaaaaccggtggcgaactggcagaagctatcaaggttgctctggcaaacaccgacggcccaaccctgatcgaatgcttcatcggtcgtgaagactgcactgaagaattggtcaaatggggtaagcgcgttgctgccgccaacagccgtaagcctgttaacaagctcctctag

SEQ ID NO: 112 - protein, 568 aa, Zymomonas mobilis
MSYTVGTYLAERLVQIGLKHHFAVAGDYNLVLLDNLLLNKNMEQVYCCNELNCGFSAEGYARAKGAAAAVVTYSVGALSAFDAIGGAYAENLPVILISGAPNNNDHAAGHVLHHALGKTDYHYQLEMAKNITAAAEAIYTPEEAPAKIDHVIKTALREKKPVYLEIACNIASMPCAAPGPASALFNDEASDEASLNAAVEETLKFIANRDKVAVLVGSKLRAAGAEEAAVKFADALGGAVATMAAAKSFFPEENPHYIGTSWGEVSYPGVEKTMKEADAVIALAPVFNDYSTTGWTDIPDPKKLVLAEPRSVVVNGIRFPSVHLKDYLTRLAQKVSKKTGALDFFKSLNAGELKKAAPADPSAPLVNAEIARQVEALLTPNTTVIAETGDSWFNAQRMKLPNGARVEYEMQWGHIGWSVPAAFGYAVGAPERRNILMVGDGSFQLTAQEVAQMVRLKLPVIIFLINNYGYTAEVMIHDGPYNNIKNWDYAGLMEVFNGNGGYDSGAGKGLKAKTGGELAEAIKVALANTDGPTLIECFIGREDCTEELVKWGKRVAAANSRKPVNKLL

SEQ ID NO: 113 - DNA, 1707 bp, Artificial Sequence
  Zymomonas mobilis pyruvate decarboxylase PdcI472A codon optimised gene
atgtcttatactgttggtacttatctggctgagcgtctggtgcaaatcggcctgaaacaccactttgcagttgctggcgactacaacctggttctgctggataacctgctgctgaacaaaaacatggagcaagtttattgctgtaacgagctgaactgcggcttctctgcggagggttatgcgcgtgcgaaaggtgccgctgcagcagtcgtaacctactctgtgggcgctctgtccgcgttcgacgcaatcggtggcgcttacgctgaaaacctgccggtgatcctgattagcggtgcgccgaataataacgaccatgctgctggccacgttctgcaccacgccctgggtaaaactgattaccattaccagctggagatggctaaaaacatcactgcagcagcagaagcgatctacaccccggaagaggctccggcaaaaatcgaccacgtgattaaaaccgctctgcgtgagaaaaagccggtatacctggaaatcgcgtgcaacatcgcgtctatgccgtgcgccgcaccgggtccggcttctgccctgttcaacgatgaggcgagcgatgaggcatctctgaacgcagcagtagaagaaaccctgaaatttatcgcaaaccgtgacaaagtagcagtcctggtaggttctaaactgcgtgcggctggtgcggaagaggctgcggtaaagttcgcggatgctctgggcggtgcagtggcgaccatggcagcggctaaatccttcttcccagaggagaacccgcattacattggtacctcctggggcgaagtttcctaccctggtgtggagaaaaccatgaaagaagccgatgctgtgattgccctggcgcctgtattcaacgattattccaccaccggttggaccgatatcccggacccgaagaaactggtcctggctgaaccgcgctccgtagtagtgaatggcattcgtttcccgtccgtacacctgaaggattacctgacgcgtctggcacagaaagtatccaagaaaactggcgcgctggacttctttaaatccctgaacgctggtgagctgaaaaaggcggctccggccgatccgtccgcaccgctggtgaacgcagagattgcacgtcaggttgaggcactgctgacgccgaacaccaccgtaatcgcggaaacgggcgactcttggttcaacgcacagcgcatgaaactgccgaacggtgcccgcgttgaatatgaaatgcagtggggtcacatcggctggtctgtcccagcagcgtttggttacgcggttggtgcaccggagcgtcgcaacatcctgatggtgggtgacggctccttccagctgactgctcaggaggtggcgcagatggtgcgcctgaagctgccggttatcattttcctgatcaacaactacggctacaccgccgaggtaatgatccacgatggtccgtacaacaacatcaaaaactgggactacgccggtctgatggaggtttttaacggtaacggcggttacgacagcggtgctggtaagggtctgaaagccaaaaccggtggcgaactggcagaggcgattaaagttgcgctggcaaacaccgatggcccgaccctgatcgagtgcttcatcggccgtgaggactgcaccgaggagctggtcaaatggggcaaacgtgtggcggctgctaactctcgcaagccggtaaacaaactgctgtaa

SEQ ID NO: 114 - DNA, 1644 bp, Lactococcus lactis
  CDS (1)..(1644)
atgtatacagtaggagattacctgttagaccgattacacgagttgggaattgaagaaatttttggagttcctggtgactataacttacaatttttagatcaaattatttcacgcgaagatatgaaatggattggaaatgctaatgaattaaatgcttcttatatggctgatggttatgctcgtactaaaaaagctgccgcatttctcaccacatttggagtcggcgaattgagtgcgatcaatggactggcaggaagttatgccgaaaatttaccagtagtagaaattgttggttcaccaacttcaaaagtacaaaatgacggaaaatttgtccatcatacactagcagatggtgattttaaacactttatgaagatgcatgaacctgttacagcagcgcggactttactgacagcagaaaatgccacatatgaaattgaccgagtactttctcaattactaaaagaaagaaaaccagtctatattaacttaccagtcgatgttgctgcagcaaaagcagagaagcctgcattatctttagaaaaagaaagctctacaacaaatacaactgaacaagtgattttgagtaagattgaagaaagtttgaaaaatgcccaaaaaccagtagtgattgcaggacacgaagtaattagttttggtttagaaaaaacggtaactcagtttgtttcagaaacaaaactaccgattacgacactaaattttggtaaaagtgctgttgatgaatctttgccctcatttttaggaatatataacgggaaactttcagaaatcagtcttaaaaattttgtggagtccgcagactttatcctaatgcttggagtgaagcttacggactcctcaacaggtgcattcacacatcatttagatgaaaataaaatgatttcactaaacatagatgaaggaataattttcaataaagtggtagaagattttgattttagagcagtggtttcttctttatcagaattaaaaggaatagaatatgaaggacaatatattgataagcaatatgaagaatttattccatcaagtgctcccttatcacaagaccgtctatggcaggcagttgaaagtttgactcaaagcaatgaaacaatcgttgctgaacaaggaacctcattttttggagcttcaacaattttcttaaaatcaaatagtcgttttattggacaacctttatggggttctattggatatacttttccagcggctttaggaagccaaattgcggataaagagagcagacaccttttatttattggtgatggttcacttcaacttaccgtacaagaattaggactatcaatcagagaaaaactcaatccaatttgttttatcataaataatgatggttatacagttgaaagagaaatccacggacctactcaaagttataacgacattccaatgtggaattactcgaaattaccagaaacatttggagcaacagaagatcgtgtagtatcaaaaattgttagaacagagaatgaatttgtgtctgtcatgaaagaagcccaagcagatgtcaatagaatgtattggatagaactagttttggaaaaagaagatgcgccaaaattactgaaaaaaatgggtaaattatttgctgagcaaaataaatag

SEQ ID NO: 115 - protein, 547 aa, Lactococcus lactis
MYTVGDYLLDRLHELGIEEIFGVPGDYNLQFLDQIISREDMKWIGNANELNASYMADGYARTKKAAAFLTTFGVGELSAINGLAGSYAENLPVVEIVGSPTSKVQNDGKFVHHTLADGDFKHFMKMHEPVTAARTLLTAENATYEIDRVLSQLLKERKPVYINLPVDVAAAKAEKPALSLEKESSTTNTTEQVILSKIEESLKNAQKPVVIAGHEVISFGLEKTVTQFVSETKLPITTLNFGKSAVDESLPSFLGIYNGKLSEISLKNFVESADFILMLGVKLTDSSTGAFTHHLDENKMISLNIDEGIIFNKVVEDFDFRAVVSSLSELKGIEYEGQYIDKQYEEFIPSSAPLSQDRLWQAVESLTQSNETIVAEQGTSFFGASTIFLKSNSRFIGQPLWGSIGYTFPAALGSQIADKESRHLLFIGDGSLQLTVQELGLSIREKLNPICFIINNDGYTVEREIHGPTQSYNDIPMWNYSKLPETFGATEDRVVSKIVRTENEFVSVMKEAQADVNRMYWIELVLEKEDAPKLLKKMGKLFAEQNK

SEQ ID NO: 116 - DNA, 1644 bp, Artificial Sequence
  Lactococcus lactis branched chain alpha-ketoacid decarboxylase KdcA codon optimised gene
atgtatactgttggtgattatctgctggaccgtctgcatgaactgggcattgaagaaatcttcggtgtcccaggcgactacaacctgcagttcctggaccagatcatctcccgcgaagatatgaaatggatcggtaacgcaaacgagctgaacgcgtcttatatggctgatggttatgctcgcaccaaaaaggctgcggcctttctgaccacctttggtgtgggcgagctgagcgcgatcaacggcctggcaggttcctacgctgagaacctgccggtagtagaaatcgttggttccccgacctctaaggttcagaacgacggcaaattcgtacatcacaccctggcggacggcgattttaagcactttatgaaaatgcacgaaccggtcaccgccgctcgcactctgctgaccgcggaaaacgcaacgtacgagatcgatcgtgtactgtcccagctgctgaaagaacgtaaaccggtgtatatcaatctgccggttgatgtcgctgcggccaaagcagagaaaccggcactgtccctggagaaggagagctccactactaacaccaccgaacaggttatcctgtccaaaattgaagaatctctgaaaaacgcacagaaaccggtggttatcgcaggtcacgaggttatctccttcggcctggagaaaactgttactcaattcgtctctgaaacgaaactgccgatcacgaccctgaactttggcaagtccgcagttgacgaatctctgccttctttcctgggcatttacaacggcaaactgtccgagatctccctgaagaacttcgtagaatccgctgactttatcctgatgctgggtgtgaaactgaccgactcctctaccggtgcgttcacgcaccatctggatgaaaacaaaatgatcagcctgaacatcgacgagggtatcatcttcaacaaggtagttgaagatttcgacttccgtgctgttgtcagcagcctgtccgagctgaaaggcattgagtacgagggtcaatacatcgataaacagtacgaagagtttattccgtcttctgcaccgctgagccaggaccgcctgtggcaggcagttgagtccctgacgcagtccaacgaaactatcgtagcggaacaaggtacctctttcttcggtgcttctaccatctttctgaagtccaactctcgctttatcggtcagccgctgtggggttctatcggttacacgttcccggctgcgctgggtagccagatcgctgataaagagtctcgtcatctgctgttcatcggtgatggttccctgcagctgactgtacaggaactgggtctgtctatccgtgaaaaactgaacccgatttgttttatcatcaataacgatggctacactgttgagcgtgaaattcatggtccgactcagtcttacaacgatattccgatgtggaactactctaaactgccggaaaccttcggtgcaactgaggatcgcgtcgtgagcaagattgtgcgtactgagaacgagttcgtatctgttatgaaagaggcgcaggcagatgtgaaccgcatgtactggatcgaactggttctggaaaaagaggatgcaccgaaactgctgaagaaaatgggtaaactgtttgcggagcagaacaagtaa

SEQ ID NO: 117 - DNA, 1647 bp, Lactococcus lactis
  CDS (1)..(1647)
atgtatacagtaggagattacctattagaccgattacacgagttaggaattgaagaaatttttggagtccctggagactataacttacaatttttagatcaaattatttcccacaaggatatgaaatgggtcggaaatgctaatgaattaaatgcttcatatatggctgatggctatgctcgtactaaaaaagctgccgcatttcttacaacctttggagtaggtgaattgagtgcagttaatggattagcaggaagttacgccgaaaatttaccagtagtagaaatagtgggatcacctacatcaaaagttcaaaatgaaggaaaatttgttcatcatacgctggctgacggtgattttaaacactttatgaaaatgcacgaacctgttacagcagctcgaactttactgacagcagaaaatgcaaccgttgaaattgaccgagtactttctgcactattaaaagaaagaaaacctgtctatatcaacttaccagttgatgttgctgctgcaaaagcagagaaaccctcactccctttgaaaaaggaaaactcaacttcaaatacaagtgaccaagaaattttgaacaaaattcaagaaagcttgaaaaatgccaaaaaaccaatcgtgattacaggacatgaaataattagttttggcttagaaaaaacagtcactcaatttatttcaaagacaaaactacctattacgacattaaactttggtaaaagttcagttgatgaagccctcccttcatttttaggaatctataatggtacactctcagagcctaatcttaaagaattcgtggaatcagccgacttcatcttgatgcttggagttaaactcacagactcttcaacaggagccttcactcatcatttaaatgaaaataaaatgatttcactgaatatagatgaaggaaaaatatttaacgaaagaatccaaaattttgattttgaatccctcatctcctctctcttagacctaagcgaaatagaatacaaaggaaaatatatcgataaaaagcaagaagactttgttccatcaaatgcgcttttatcacaagaccgcctatggcaagcagttgaaaacctaactcaaagcaatgaaacaatcgttgctgaacaagggacatcattctttggcgcttcatcaattttcttaaaatcaaagagtcattttattggtcaacccttatggggatcaattggatatacattcccagcagcattaggaagccaaattgcagataaagaaagcagacaccttttatttattggtgatggttcacttcaacttacagtgcaagaattaggattagcaatcagagaaaaaattaatccaatttgctttattatcaataatgatggttatacagtcgaaagagaaattcatggaccaaatcaaagctacaatgatattccaatgtggaattactcaaaattaccagaatcgtttggagcaacagaagatcgagtagtctcaaaaatcgttagaactgaaaatgaatttgtgtctgtcatgaaagaagctcaagcagatccaaatagaatgtactggattgagttaattttggcaaaagaaggtgcaccaaaagtactgaaaaaaatgggcaaactatttgctgaacaaaataaatcataa

SEQ ID NO: 118 - protein, 548 aa, Lactococcus lactis
MYTVGDYLLDRLHELGIEEIFGVPGDYNLQFLDQIISHKDMKWVGNANELNASYMADGYARTKKAAAFLTTFGVGELSAVNGLAGSYAENLPVVEIVGSPTSKVQNEGKFVHHTLADGDFKHFMKMHEPVTAARTLLTAENATVEIDRVLSALLKERKPVYINLPVDVAAAKAEKPSLPLKKENSTSNTSDQEILNKIQESLKNAKKPIVITGHEIISFGLEKTVTQFISKTKLPITTLNFGKSSVDEALPSFLGIYNGTLSEPNLKEFVESADFILMLGVKLTDSSTGAFTHHLNENKMISLNIDEGKIFNERIQNFDFESLISSLLDLSEIEYKGKYIDKKQEDFVPSNALLSQDRLWQAVENLTQSNETIVAEQGTSFFGASSIFLKSKSHFIGQPLWGSIGYTFPAALGSQIADKESRHLLFIGDGSLQLTVQELGLAIREKINPICFIINNDGYTVEREIHGPNQSYNDIPMWNYSKLPESFGATEDRVVSKIVRTENEFVSVMKEAQADPNRMYWIELILAKEGAPKVLKKMGKLFAEQNKS

SEQ ID NO: 119 - DNA, 1647 bp, Artificial Sequence
  Lactococcus lactis  -ketoisovalerate decarboxylase KivD codon optimised gene
atgtatactgttggtgattacctgctggatcgtctgcatgaactgggcatcgaggaaattttcggcgtacctggtgactataacctgcagttcctggatcagatcatttcccacaaagatatgaaatgggttggtaacgcgaacgagctgaatgcaagctacatggctgacggttatgcacgcaccaagaaagctgcggcgttcctgactacttttggcgtcggcgagctgtctgcggtaaacggtctggccggctcctacgcggaaaacctgccggtagtagaaatcgtcggttccccgacctctaaagttcagaacgagggtaaattcgtgcaccatactctggccgatggtgacttcaaacacttcatgaagatgcacgaaccggtcactgctgctcgtacgctgctgaccgcggaaaatgcgactgtcgagattgatcgtgtactgagcgcactgctgaaagaacgcaagcctgtatacatcaacctgccggttgatgtcgcggccgccaaagcggaaaaaccatctctgccgctgaaaaaggagaacagcacctctaacaccagcgaccaggaaatcctgaacaagatccaggagtctctgaagaacgctaaaaagccgatcgtaatcaccggccatgagattatctctttcggtctggagaaaactgtcacccagttcatcagcaaaaccaaactgccgatcaccaccctgaacttcggtaaatcctccgttgacgaagcgctgccgtcctttctgggtatttacaacggcactctgtctgagccgaacctgaaagagttcgtggagtctgcggattttatcctgatgctgggcgtgaaactgacggattcctccaccggtgcattcacccaccacctgaatgagaataaaatgatctctctgaacattgatgagggcaaaatcttcaacgagcgtattcagaacttcgatttcgaatccctgatctcctccctgctggatctgtccgagattgaatataaaggcaaatacattgataagaagcaagaggacttcgtaccgtctaacgcgctgctgagccaggaccgtctgtggcaagctgtggaaaacctgacccagtccaacgaaaccatcgtggcggaacagggtacctccttcttcggtgctagctctatcttcctgaaatctaaaagccacttcatcggtcagccactgtggggctctattggctacaccttcccggcagcgctgggttcccaaatcgcagacaaagaatcccgccacctgctgttcattggtgacggctctctgcaactgaccgtacaggagctgggtctggcgattcgtgagaaaatcaacccgatttgtttcatcatcaacaacgatggctacactgttgagcgtgagatccacggcccgaaccagtcctacaacgacattccgatgtggaactactctaaactgccggaatccttcggtgcgactgaagaccgtgtcgtaagcaagatcgtccgtaccgaaaacgaattcgtgtctgtcatgaaagaagcacaggcggacccgaaccgcatgtactggatcgagctgattctggctaaagagggcgcgccaaaagtactgaaaaagatgggtaaactgttcgcagaacagaacaaatcctaa

SEQ ID NO: 120 - DNA, 3696 bp, Mycobacterium tuberculosis
  CDS (1)..(3696)
gtggccaacataagttcaccattcgggcaaaacgaatggctggtcgaagagatgtaccgcaagttccgcgacgacccctcctcggtcgatcccagctggcacgagttcctggttgactacagccccgaacccacctcccaaccagctgccgaaccaacccgggttacctcgccactcgttgccgagcgggccgctgcggccgccccgcaggcaccccccaagccggccgacaccgcggccgcgggcaacggcgtggtcgccgcactggccgccaaaactgccgttcccccgccagccgaaggtgacgaggtagcggtgctgcgcggcgccgccgcggccgtcgtcaagaacatgtccgcgtcgttggaggtgccgacggcgaccagcgtccgggcggtcccggccaagctactgatcgacaaccggatcgtcatcaacaaccagttgaagcggacccgcggcggcaagatctcgttcacgcatttgctgggctacgccctggtgcaggcggtgaagaaattcccgaacatgaaccggcactacaccgaagtcgacggcaagcccaccgcggtcacgccggcgcacaccaatctcggcctggcgatcgacctgcaaggcaaggacgggaagcgttccctggtggtggccggcatcaagcggtgcgagaccatgcgattcgcgcagttcgtcacggcctacgaagacatcgtacgccgggcccgcgacggcaagctgaccactgaagactttgccggcgtgacgatttcgctgaccaatcccggaaccatcggcaccgtgcattcggtgccgcggctgatgcccggccagggcgccatcatcggcgtgggcgccatggaataccccgccgagtttcaaggcgccagcgaggaacgcatcgccgagctgggcatcggcaaattgatcactttgacctccacctacgaccaccgcatcatccagggcgcggaatcgggcgacttcctgcgcaccatccacgagttgctgctctcggatggcttctgggacgaggtcttccgcgaactgagcatcccatatctgccggtgcgctggagcaccgacaaccccgactcgatcgtcgacaagaacgctcgcgtcatgaacttgatcgcggcctaccgcaaccgcggccatctgatggccgataccgacccgctgcggttggacaaagctcggttccgcagtcaccccgacctcgaagtgctgacccacggcctgacgctgtgggatctcgatcgggtgttcaaggtcgacggctttgccggtgcgcagtacaagaaactgcgcgacgtgctgggcttgctgcgcgatgcctactgccgccacatcggcgtggagtacgcccatatcctcgaccccgaacaaaaggagtggctcgaacaacgggtcgagaccaagcacgtcaaacccactgtggcccaacagaaatacatcctcagcaagctcaacgccgccgaggcctttgaaacgttcctacagaccaagtacgtcggccagaagcggttctcgctggaaggcgccgaaagcgtgatcccgatgatggacgcggcgatcgaccagtgcgctgagcacggcctcgacgaggtggtcatcgggatgccgcaccggggccggctcaacgtgctggccaacatcgtcggcaagccgtactcgcagatcttcaccgagttcgagggcaacctgaatccgtcgcaggcgcacggctccggtgacgtcaagtaccacctgggcgccaccgggctgtacctgcagatgttcggcgacaacgacattcaggtgtcgctgaccgccaacccgtcgcatctggaggccgtcgacccggtgctggagggattggtgcgggccaagcaggatctgctcgaccacggaagcatcgacagcgacggccaacgggcgttctcggtggtgccgctgatgttgcatggcgatgccgcgttcgccggtcagggtgtggtcgccgagacgctgaacctggcgaatctgccgggctaccgcgtcggcggcaccatccacatcatcgtcaacaaccagatcggcttcaccaccgcgcccgagtattccaggtccagcgagtactgcaccgacgtcgcaaagatgatcggggcaccgatctttcacgtcaacggcgacgacccggaggcgtgtgtctgggtggcgcggttggcggtggacttccgacaacggttcaagaaggacgtcgtcatcgacatgctgtgctaccgccgccgcgggcacaacgagggtgacgacccgtcgatgaccaacccctacgtgtacgacgtcgtcgacaccaagcgcggggcccgcaaaagctacaccgaagccctgatcggacgtggcgacatctcgatgaaggaggccgaggacgcgctgcgcgactaccagggccagctggaacgggtgttcaacgaagtgcgcgagctggagaagcacggtgtgcagccgagcgagtcggtcgagtccgaccagatgattcccgcggggctggccactgcggtggacaagtcgctgctggcccggatcggcgatgcgttcctcgccttgccgaacggcttcaccgcgcacccgcgagtccaaccggtgctggagaagcgccgggagatggcctatgaaggcaagatcgactgggcctttggcgagctgctggcgctgggctcgctggtggccgaaggcaagctggtgcgcttgtcggggcaggacagccgccgcggcaccttctcccagcggcattcggttctcatcgaccgccacactggcgaggagttcacaccactgcagctgctggcgaccaactccgacggcagcccgaccggcggaaagttcctggtctacgactcgccactgtcggagtacgccgccgtcggcttcgagtacggctacactgtgggcaatccggacgccgtggtgctctgggaggcgcagttcggcgacttcgtcaacggcgcgcagtcgatcatcgacgagttcatcagctccggtgaggccaagtggggccaattgtccaacgtcgtgctgctgttaccgcacgggcacgaggggcagggacccgaccacacttctgcccggatcgaacgcttcttgcagttgtgggcggaaggttcgatgaccatcgcgatgccgtcgactccgtcgaactacttccacctgctacgccggcatgccctggacggcatccaacgcccgctgatcgtgttcacgcccaagtcgatgttgcgtcacaaggccgccgtcagcgaaatcaaggacttcaccgagatcaagttccgctcagtgctggaggaacccacctatgaggacggcatcggagaccgcaacaaggtcagccggatcctgctgaccagtggcaagctgtattacgagctggccgcccgcaaggccaaggacaaccgcaatgacctcgcgatcgtgcggcttgaacagctcgccccgctgcccaggcgtcgactgcgtgaaacgctggaccgctacgagaacgtcaaggagttcttctgggtccaagaggaaccggccaaccagggtgcgtggccgcgattcgggctcgaactacccgagctgctgcctgacaagttggccgggatcaagcgaatctcgcgccgggcgatgtcagccccgtcgtcaggctcgtcgaaggtgcacgccgtcgaacagcaggagatcctcgacgaggcgttcggctga

SEQ ID NO: 121 - protein, 1231 aa, Mycobacterium tuberculosis
VANISSPFGQNEWLVEEMYRKFRDDPSSVDPSWHEFLVDYSPEPTSQPAAEPTRVTSPLVAERAAAAAPQAPPKPADTAAAGNGVVAALAAKTAVPPPAEGDEVAVLRGAAAAVVKNMSASLEVPTATSVRAVPAKLLIDNRIVINNQLKRTRGGKISFTHLLGYALVQAVKKFPNMNRHYTEVDGKPTAVTPAHTNLGLAIDLQGKDGKRSLVVAGIKRCETMRFAQFVTAYEDIVRRARDGKLTTEDFAGVTISLTNPGTIGTVHSVPRLMPGQGAIIGVGAMEYPAEFQGASEERIAELGIGKLITLTSTYDHRIIQGAESGDFLRTIHELLLSDGFWDEVFRELSIPYLPVRWSTDNPDSIVDKNARVMNLIAAYRNRGHLMADTDPLRLDKARFRSHPDLEVLTHGLTLWDLDRVFKVDGFAGAQYKKLRDVLGLLRDAYCRHIGVEYAHILDPEQKEWLEQRVETKHVKPTVAQQKYILSKLNAAEAFETFLQTKYVGQKRFSLEGAESVIPMMDAAIDQCAEHGLDEVVIGMPHRGRLNVLANIVGKPYSQIFTEFEGNLNPSQAHGSGDVKYHLGATGLYLQMFGDNDIQVSLTANPSHLEAVDPVLEGLVRAKQDLLDHGSIDSDGQRAFSVVPLMLHGDAAFAGQGVVAETLNLANLPGYRVGGTIHIIVNNQIGFTTAPEYSRSSEYCTDVAKMIGAPIFHVNGDDPEACVWVARLAVDFRQRFKKDVVIDMLCYRRRGHNEGDDPSMTNPYVYDVVDTKRGARKSYTEALIGRGDISMKEAEDALRDYQGQLERVFNEVRELEKHGVQPSESVESDQMIPAGLATAVDKSLLARIGDAFLALPNGFTAHPRVQPVLEKRREMAYEGKIDWAFGELLALGSLVAEGKLVRLSGQDSRRGTFSQRHSVLIDRHTGEEFTPLQLLATNSDGSPTGGKFLVYDSPLSEYAAVGFEYGYTVGNPDAVVLWEAQFGDFVNGAQSIIDEFISSGEAKWGQLSNVVLLLPHGHEGQGPDHTSARIERFLQLWAEGSMTIAMPSTPSNYFHLLRRHALDGIQRPLIVFTPKSMLRHKAAVSEIKDFTEIKFRSVLEEPTYEDGIGDRNKVSRILLTSGKLYYELAARKAKDNRNDLAIVRLEQLAPLPRRRLRETLDRYENVKEFFWVQEEPANQGAWPRFGLELPELLPDKLAGIKRISRRAMSAPSSGSSKVHAVEQQEILDEAFG

SEQ ID NO: 122 - DNA, 3696 bp, Artificial Sequence
  Mycobacterium tuberculosis  -ketoglutarate decarboxylase Kgd codon optimised gene
atggctaatatctcctctccgtttggtcagaatgaatggctggtagaagaaatgtaccgtaaattccgcgatgacccgtcctctgtggacccgtcctggcatgaattcctggtagactacagcccggagccgaccagccaaccggcagcggaaccaacccgcgttacttctccgctggtagcggaacgtgcagctgctgccgcgcctcaggcgccgcctaaaccggcggatactgccgcagccggtaacggtgtggtggccgcactggctgctaagactgcggttccgccgccagcagaaggcgatgaagttgcagtcctgcgcggtgcggcggctgcagtggtgaaaaacatgagcgcgtccctggaggtaccgaccgccacgagcgtgcgcgcggtccctgctaaactgctgattgataaccgtattgtgatcaacaaccagctgaaacgtacccgtggtggcaagatctccttcactcatctgctgggttatgcactggtacaagcggttaagaaattccctaacatgaaccgtcattacactgaggtcgacggtaaaccgacggctgttactccggcacacacgaacctgggcctggcgatcgacctgcaaggtaaagatggtaagcgctccctggtagttgcgggtattaaacgttgcgaaaccatgcgtttcgcacaattcgtaaccgcctacgaggacattgtccgccgtgctcgtgatggcaaactgaccaccgaagattttgcgggcgttactattagcctgaccaacccaggcaccatcggcaccgtgcacagcgtacctcgtctgatgccgggccaaggtgcgattatcggtgtgggtgccatggagtacccggcagaatttcagggtgcttctgaagagcgcatcgccgagctgggtattggtaaactgatcaccctgacttctacctatgaccaccgcatcattcagggcgcagaatccggtgacttcctgcgcactattcacgaactgctgctgtccgacggtttctgggatgaagtttttcgtgaactgagcatcccatatctgccagttcgctggtccaccgacaatccggactctatcgttgacaaaaacgctcgcgtaatgaacctgatcgctgcttatcgtaatcgtggtcacctgatggctgatacggatccgctgcgcctggataaagctcgtttccgttcccacccggacctggaagtgctgacccatggtctgactctgtgggatctggaccgcgtgttcaaagtagatggtttcgcgggtgctcagtacaagaagctgcgtgacgtgctgggtctgctgcgtgatgcgtactgtcgtcacattggtgtggagtacgcccacattctggatccggaacagaaagaatggctggagcagcgtgtcgagaccaaacacgtaaaaccgaccgtagcgcagcagaaatatatcctgtccaaactgaacgccgccgaggctttcgaaactttcctgcagaccaagtacgtgggccagaaacgcttcagcctggagggtgcggaaagcgttattccgatgatggatgcagctatcgatcagtgcgcggaacatggtctggatgaagtcgttatcggtatgccgcaccgtggtcgcctgaacgtactggcaaacatcgtcggtaaaccatattctcagatcttcacggaattcgagggcaacctgaacccgtcccaagcccacggctccggcgacgtaaaatatcatctgggtgctaccggcctgtatctgcagatgttcggtgataacgacatccaggtatctctgactgctaacccgagccacctggaggcggttgatcctgttctggaaggtctggttcgcgccaaacaggatctgctggaccacggctctatcgacagcgatggccagcgtgcattcagcgttgtaccgctgatgctgcatggcgacgcggcgttcgccggtcagggtgtcgtagcagaaactctgaacctggcgaacctgcctggctatcgcgtgggtggcaccattcacatcatcgttaacaaccaaatcggtttcaccacggcaccggagtatagccgttctagcgaatattgcaccgacgtagccaaaatgatcggtgcgccgatcttccatgtaaacggtgacgatccagaggcctgcgtgtgggtggctcgtctggccgtagacttccgccagcgttttaagaaagatgtggttatcgacatgctgtgctaccgccgtcgtggtcacaacgaaggtgatgatccgtctatgactaacccgtatgtctatgacgtggtggacaccaagcgtggtgcacgcaaatcttacacggaggccctgatcggtcgtggcgacatctctatgaaagaagcggaagacgctctgcgtgattaccagggtcagctggaacgtgtgttcaatgaggtgcgtgagctggaaaagcacggcgtacaaccgtccgaatccgtagagtccgatcagatgatccctgctggtctggcaactgctgttgataaaagcctgctggcgcgtatcggcgacgcattcctggcgctgccgaatggctttaccgcgcacccgcgcgtacagccggtactggaaaaacgtcgtgaaatggcctacgaaggtaaaatcgattgggccttcggtgagctgctggccctgggctctctggtggctgagggcaagctggtacgcctgagcggccaggactcccgtcgcggcactttttctcagcgtcacagcgtcctgatcgatcgtcacaccggcgaagaattcacgccgctgcaactgctggctactaactccgatggtagcccgaccggtggtaagttcctggtgtacgattccccgctgtccgaatatgctgcagttggtttcgagtatggttacaccgttggcaacccggacgcagtggttctgtgggaagcgcagttcggcgatttcgttaacggtgcccagtccattatcgatgagtttattagcagcggcgaggccaaatggggccagctgtctaacgttgtgctgctgctgcctcacggccacgagggtcaaggcccggaccacacctccgcccgtatcgaacgcttcctgcagctgtgggctgaaggctctatgaccatcgcgatgccgtctaccccaagcaactacttccacctgctgcgtcgccacgcactggacggcattcagcgcccgctgatcgttttcaccccaaaatccatgctgcgccacaaagcagctgtttctgaaatcaaagattttacggaaattaaattccgttctgtgctggaagaaccaacctacgaagacggtattggcgaccgcaacaaggtaagccgtatcctgctgacctccggcaaactgtactacgagctggcagcacgtaaggcaaaagataaccgcaacgacctggccatcgtccgcctggaacagctggcgccactgccacgccgtcgcctgcgtgaaaccctggatcgctacgaaaacgtaaaagaattcttctgggtgcaggaagaaccggcaaaccagggtgcgtggccgcgctttggtctggaactgccggaactgctgccggataaactggcaggtatcaagcgcatcagccgtcgcgctatgagcgccccgtcttctggtagctctaaagtacacgctgtagaacagcaagagatcctggatgaggccttcggctaa

SEQ ID NO: 123 - DNA, 74 bp, Artificial Sequence
  Forward primer for amplification of Bacillus subtilis aminotransferase x
ggggacaagtttgtacaaaaaagcaggctaggaggaattaaccatgaaggttttagtcaatggccggctgattg

SEQ ID NO: 124 - DNA, 62 bp, Artificial Sequence
  Reverse primer for amplification of Bacillus subtilis aminotransferase x
ggggaccactttgtacaagaaagctgggtttatgaaatgctagcagcctgttgaatgctttc

SEQ ID NO: 125 - DNA, 82 bp, Artificial Sequence
  Forward primer for amplification of Bacillus subtilis aminotransferase y
ggggacaagtttgtacaaaaaagcaggctaggaggaattaaccatgactcatgatttgatagaaaaaagtaaaaagcacctc

SEQ ID NO: 126 - DNA, 57 bp, Artificial Sequence
  Reverse primer for amplification of Bacillus subtilis aminotransferase y
ggggaccactttgtacaagaaagctgggttcaatcttcaaggctcgtaacctcgtgg

SEQ ID NO: 127 - DNA, 64 bp, Artificial Sequence
  Forward primer for amplification of Rhodobacter sphaeroides aminotransferase
ggggacaagtttgtacaaaaaagcaggctaggaggaattaaccatgcccggttgcgggggcttg

SEQ ID NO: 128 - DNA, 51 bp, Artificial Sequence
  Reverse primer for amplification of Rhodobacter sphaeroides aminotransferase
ggggaccactttgtacaagaaagctgggttcagacggcggccggttctttc

SEQ ID NO: 129 - DNA, 78 bp, Artificial Sequence
  Forward primer for amplification of Legionella pneumophila aminotransferase
ggggacaagtttgtacaaaaaagcaggctaggaggaattaaccatgagtatcgcatttgttaacggcaagtattgttg

SEQ ID NO: 130 - DNA, 67 bp, Artificial Sequence
  Reverse primer for amplification of Legionella pneumophila aminotransferase
ggggaccactttgtacaagaaagctgggtttagtttactagttgttggtaggaatcattaattatcc

SEQ ID NO: 131 - DNA, 76 bp, Artificial Sequence
  Forward primer for amplification of Nitrosomonas europaea aminotransferase
ggggacaagtttgtacaaaaaagcaggctaggaggaattaaccatgatttacctcaatggcaaatttctgccgatg

SEQ ID NO: 132 - DNA, 50 bp, Artificial Sequence
  Reverse primer for amplification of Nitrosomonas europaea aminotransferase
ggggaccactttgtacaagaaagctgggtttactggcgtggagcatgccc

SEQ ID NO: 133 - DNA, 79 bp, Artificial Sequence
  Forward primer for amplification of Neisseria gonorrhoeae aminotransferase
ggggacaagtttgtacaaaaaagcaggctaggaggaattaaccatgaggataaatatgaaccgtaacgaaattttattc

SEQ ID NO: 134 - DNA, 56 bp, Artificial Sequence
  Reverse primer for amplification of Neisseria gonorrhoeae aminotransferase
ggggaccactttgtacaagaaagctgggttcatgcagccatcgccttgaacacttc

SEQ ID NO: 135 - DNA, 66 bp, Artificial Sequence
  Forward primer for amplification of Pseudomonas aeruginosa aminotransferase
ggggacaagtttgtacaaaaaagcaggctaggaggaattaaccatgtcgatggccgatcgtgatgg

SEQ ID NO: 136 - DNA, 53 bp, Artificial Sequence
  Reverse primer for amplification of Pseudomonas aeruginosa aminotransferase
ggggaccactttgtacaagaaagctgggtttacttgaccagggtacgccactc

SEQ ID NO: 137 - DNA, 67 bp, Artificial Sequence
  Forward primer for amplification of Rhodopseudomonas palustris aminotransferase
ggggacaagtttgtacaaaaaagcaggctaggaggaattaaccatgaagctgataccgtgccgcgcc

SEQ ID NO: 138 - DNA, 51 bp, Artificial Sequence
  Reverse primer for amplification of Rhodopseudomonas palustris aminotransferase
ggggaccactttgtacaagaaagctgggttcaggcgaccgcgcggatcacc

SEQ ID NO: 139 - DNA, 71 bp, Artificial Sequence
  Forward primer for amplification of Bacillus subtilis aminotransferase (gi16077991)
ggggacaagtttgtacaaaaaagcaggctaggaggaattaaccatggagatgatggggatggaaaacattc

SEQ ID NO: 140 - DNA, 65 bp, Artificial Sequence
  Reverse primer for amplification of Bacillus subtilis aminotransferase (gi16077991)
ggggaccactttgtacaagaaagctgggtttatatcgtttgaaagctttctttcaccgttttcac

SEQ ID NO: 141 - DNA, 66 bp, Artificial Sequence
  Forward primer for amplification of Pseudomonas aeruginosa aminotransferase (gi9951072)
ggggacaagtttgtacaaaaaagcaggctaggaggaattaaccatgaacgcaagactgcacgccac

SEQ ID NO: 142 - DNA, 48 bp, Artificial Sequence
  Reverse primer for amplification of Pseudomonas aeruginosa aminotransferase (gi9951072)
ggggaccactttgtacaagaaagctgggtttaccggtgaccggcgcgg

SEQ ID NO: 143 - DNA, 69 bp, Artificial Sequence
  Forward primer for amplification of Pseudomonas aeruginosa aminotransferase (gi9951630)
ggggacaagtttgtacaaaaaagcaggctaggaggaattaaccatgacaatgaatgacgagccgcagtc

SEQ ID NO: 144 - DNA, 49 bp, Artificial Sequence
  Reverse primer for amplification of Pseudomonas aeruginosa aminotransferase (gi9951630)
ggggaccactttgtacaagaaagctgggttcagacgctggcgcggatgg

SEQ ID NO: 145 - DNA, 1221 bp, Methanococcus jannaschii
atgacaaaagtgctggtgatgtttatggatttcttatttgagaacagctggaaagcagtttgtccctacaatccaaagttggatttaaaggacatttatatttatgacacaaccctaagagatggagagcaaaccccaggagtttgctttaccaaagaacaaaaattggagattgcaaggaagttggatgaacttggattaaagcagattgaagctggcttcccaatagtatctgaaagagaagcagatatagttaaaacaattgctaatgaagggctaaatgctgatatcttagctttatgcagggctttaaagaaagatatagataaagcaatagagtgcgatgtagatgggattattaccttcatagcaacatctcctctccacttaaaatataaattcaacaacaaaagcttagatgaaatattagagatgggagttgaggcagttgagtatgcaaaggaacatggcttatttgttgctttctctgcagaggatgcgacaagaacaccaatagaggacttgattaaagtgcataaagccgctgaagaggctggagcagatagggttcatatagcagacacaactggctgtgctaccccccaaagtatggagtttatatgtaaaacattgaaggagaacttaaaaaaggcacatattggagtgcattgtcacaacgactttggatttgcagttataaattcaatatatggtttaattggaggagctaaggcagtttcaacaacagttaatggtattggagagagggcagggaatgcagctttagaagagctaattatggctttaactgtcttgtatgatgttgatttgggattaaacttggaggttcttccagagttatgcagaatggttgaggaatactctggaataaagatgccaaagaacaaaccaatagttggagagcttgtatttgctcatgaaagtggaattcacgttgatgctgtcatagagaatccattaacctatgaacccttccttccagagaaaatagggcttaagagaaatattttgttagggaagcattctggatgcagagccgttgcctataagctaaaacttatgggaattgattacgatagagagatgttgtgcgagattgttaaaaaggttaaagagattagagaggaaggtaaatttataactgatgaagtctttaaggagattgttgaagaagttttaaggaagagaaataaaaattaa

SEQ ID NO: 146 - DNA, 513 bp, Methanococcus jannaschii
atgattattaagggaagagctcacaaatttggggatgatgtagatacagacgcaataattccaggaccttacttaaggactacagacccttacgagttagcttcacactgcatggcagggatagatgaaaacttcccgaaaaaggttaaggagggggatgtgatagttgctggagagaattttggttgtggttcaagtagggagcaggctgtaatagcaataaaatactgtggtattaaggctgtgatagcaaaaagctttgcaagaatattctatagaaatgcaataaacgttggattaataccaataatagcaaatacagatgaaattaaagacggagacatagtagagattgatttagataaagaagagattgtaataaccaataaaaacaaaacaataaagtgtgaaacaccaaaaggtttagaaagagaaatattggctgctggtggcttagtcaattatttaaaaaagagaaaactaatacaatcaaaaaaaggtgtaaaaacatga

SEQ ID NO: 147 - DNA, 1263 bp, Methanococcus jannaschii
ttgacattggtagagaagatactatcaaaaaaagttggttatgaagtttgtgcaggagatagcatagaggttgaagttgatttggcaatgacacacgatggaacaacacctttagcatacaaagctttaaaggaaatgagtgatagtgtttggaatccagataaaatagtcgttgcctttgaccacaatgttccaccaaacacagttaaagctgctgaaatgcaaaaattagctttggagtttgttaaaagatttggcattaaaaatttccataaaggtggagaaggcatctgtcatcaaatcttagctgaaaattatgttttgccaaacatgtttgtagctggtggagacagccatacatgcacacatggagcttttggagcttttgctactggctttggagctactgatatggcttacatctatgcaacaggagaaacatggattaaagtgccaaaaacaattagggtagatatagttggaaaaaatgaaaatgtttctgccaaagatattgttttaagggtttgtaaggaaattgggagaagaggagcaacatacatggctattgagtatggtggagaggttgttaaaaacatggacatggatggaaggctaactttatgcaacatggcaatagagatgggaggaaaaacaggagtgatagaggctgatgaaattacttatgattatttaaagaaagagagaggactttctgatgaggatatagctaaattaaaaaaagagagaataacagtaaatagagatgaagcaaactactataaggagatagaaattgacataacagatatggaagaacaagttgctgttccacaccacccagataacgtaaagccaattagtgatgttgaagggactgagataaatcaagtttttattgggagttgcacaaatggaaggttgagtgatttaagagaagcagctaaatatttaaaaggtagggaggttcataaagatgttaagctaattgttatcccggcatcaaaaaaggtatttttgcaagcgttaaaagagggtattatagatatctttgttaaagctggggcgatgatttgcactccgggatgcggaccttgcttaggagctcatcaaggggttttggctgagggagaaatttgtttatcaacaacaaacagaaactttaaaggaaggatggggcatataaatagctatatttacttggcatctccaaagattgccgcaataagtgcagttaagggatatataaccaacaaattggattaa

SEQ ID NO: 148 - DNA, 1044 bp, Methanococcus jannaschii
atgatgaaggtgtgtgttatagaaggggatggaataggaaaagaagtgattccagaggccataaaaatattaaatgagttgggagagtttgaaataataaaaggagaggcaggattagaatgtttaaaaaaatatggtaatgcacttccagaggatacaatagaaaaagctaaagaggcagatattattttgtttggggctataacctcaccaaagccaggggaagttcaaaattataaaagccctataataacgttgaggaagatgtttcatttatatgcaaatgtaagaccaataaacaactttggaattggacaattaattgggaaaattgcagattatgaattcttaaatgctaagaatattgatatagttattataagagagaatacggaagatttatatgttggtagagagagattagaaaatgatacagcaatagctgagagggttataacaagaaagggtagcgagagaataataagatttgcatttgaatatgctataaaaaataataggaaaaaggtatcttgcatccataaagctaatgttttaagaataactgatggtttattcttagaggtttttaatgaaataaaaaaacattataatatagaggcagatgattatttagttgattcaacagctatgaacttaataaaacatcctgaaaaatttgatgttattgttacaacaaacatgtttggggatattttatcagatgaggcatctgcattaattggaggacttggtttagctccttcagcaaatataggagatgataaagcattatttgagccagttcatggttcagctccagatatagctgggaaaggtatagcaaatccaatggcatctatattaagtattgctatgctttttgattatattggagagaaagaaaagggagatttgattagagaggcagtgaaatactgcttaataaacaaaaaagttactcctgacttgggaggggatttaaagacaaaagatgttggagacgaaattctaaattacattagaaagaagttaaagggatattga

SEQ ID NO: 149 - DNA, 1155 bp, Azotobacter vinelandii
atggctagcgtgatcatcgacgacactaccctgcgtgacggtgaacagagtgccggggtcgccttcaatgccgacgagaagatcgctatcgcccgcgcgctcgccgaactgggcgtgccggagttggagatcggcattcccagcatgggcgaggaagagcgcgaggtgatgcacgccatcgccggtctcggcctgtcgtctcgcctgctggcctggtgccggctatgcgacgtcgatctcgcggcggcgcgctccaccggggtgaccatggtcgacctttcgctgccggtctccgacctgatgctgcaccacaagctcaatcgcgatcgcgactgggccttgcgcgaagtggccaggctggtcggcgaagcgcgcatggccgggctcgaggtgtgcctgggctgcgaggacgcctcgcgggcggatctggagttcgtcgtgcaggtgggcgaagtggcgcaggccgccggcgcccgtcggctgcgcttcgccgacaccgtcggggtcatggagcccttcggcatgctcgaccgcttccgtttcctcagccggcgcctggacatggagctggaagtgcacgcccacgatgatttcgggctggccacggccaacaccctggccgcggtgatgggcggggcgactcatatcaacaccacggtcaacgggctcggcgagcgtgccggcaacgccgcgctggaagagtgcgtgctggcgctcaagaacctccacggtatcgacaccggtatcgatacccgcggcatcccggccatctccgcgctggtcgagcgggcctcggggcgccaggtggcctggcagaagagcgtggtcggcgccggggtgttcactcacgaggccggtatccacgtcgacggactgctcaagcatcggcgcaactacgaggggctgaatcccgacgaactcggtcgcagccacagtctggtgctgggcaagcattccggggcgcacatggtgcgcaacacgtaccgcgatctgggtatcgagctggcggactggcagagccaagcgctgctcggccgcatccgtgccttctccaccaggaccaagcgcagcccgcagcctgccgagctgcaggatttctatcggcagttgtgcgagcaaggcaatcccgaactggccgcaggaggaatggcatga

SEQ ID NO: 150 - DNA, 30 bp, Artificial Sequence
  Avine-WT-R-BamHI
aaattggatcctcatgccattcctcctgcg

SEQ ID NO: 151 - DNA, 75 bp, Artificial Sequence
  Avine-WT-F-SacI
aaattgagctctttctccatacccgtttttttgggctaacaggaggaattaaccatggctagcgtgatcatcgac

SEQ ID NO: 152 - DNA, 31 bp, Artificial Sequence
  Avine-WT-R-HindIII
aaattaaagctttcatgccattcctcctgcg

SEQ ID NO: 153 - DNA, 76 bp, Artificial Sequence
  Avine-WT-F-HindIII
aaattaaagctttttctccatacccgtttttttgggctaacaggaggaattaaccatggctagcgtgatcatcgac

SEQ ID NO: 154 - DNA, 21 bp, Artificial Sequence
  AksA-Avine-F
atggctagcgtgatcatcgac

SEQ ID NO: 155 - DNA, 32 bp, Artificial Sequence
  AksA-Avine-R1
aaattggcgcgcctcatgccattcctcctgcg

SEQ ID NO: 156 - DNA, 32 bp, Artificial Sequence
  Pgal2-F2
aaattgttaactccagaaggcacatctattac

SEQ ID NO: 157 - DNA, 49 bp, Artificial Sequence
  Pgal2-R
cgtcgatgatcacgctagccattatgaaagcctccttttttttattatg

SEQ ID NO: 158 - DNA, 207 bp, Artificial Sequence
  mtSP
atggcctccactcgtgtcctcgcctctcgcctggcctcccagatggctgcttccgccaaggttgcccgccctgctgtccgcgttgctcaggtcagcaagcgcaccatccagactggctcccccctccagaccctcaagcgcacccagatgacctccatcgtcaacgccaccacccgccaggctttccagaagcgcgcctactcttcc

SEQ ID NO: 159 - DNA, 29 bp, Artificial Sequence
  pF113-F-NsiI
aaattatgcatacagcatggcctgcaacg

SEQ ID NO: 160 - DNA, 31 bp, Artificial Sequence
  pF113-R-AgeI
aaattaccggtcagggttattgtctcatgag

SEQ ID NO: 161 - DNA, 32 bp, Artificial Sequence
  AT-Vfl_for_Ec
aaatttggtaccgctaggaggaattaaccatg

SEQ ID NO: 162 - DNA, 33 bp, Artificial Sequence
  Kdc_for_Ec
aaatttactagtggctaggaggaattacatatg

SEQ ID NO: 163 - DNA, 35 bp, Artificial Sequence
  Kdc_rev_Ec
aaatttaagcttattacttgttctgctccgcaaac

SEQ ID NO: 164 - DNA, 57 bp, Artificial Sequence
  AT-Vfl-F
aaatttactagtaagaatttttgaggaggcaatataaatgaataaaccacagtcttg

SEQ ID NO: 165 - DNA, 32 bp, Artificial Sequence
  AT-Vfl-R
aaatttggatcctacaagaaagctgggtttac

SEQ ID NO: 166 - DNA, 33 bp, Artificial Sequence
  AT-Vfl_rev_Ec
aaatttactagtaagctgggtttacgcgacttc

SEQ ID NO: 167 - DNA, 1221 bp, Escherichia coli
atgaccaaagttctggtaatgttcatggacttcctgttcgaaaactcctggaaagcggtttgcccgtacaacccgaaactggatctgaaagacatctacatctacgacaccactctgcgtgacggtgaacagactccgggcgtttgcttcaccaaagagcagaagctggaaatcgctcgtaagctggacgaactgggtctgaagcagatcgaagctggcttcccgatcgtttctgaacgtgaagctgacatcgttaaaactatcgctaacgaaggtctgaacgctgacatcctggcactgtgccgtgcgctgaagaaagacatcgacaaagcaatcgaatgcgacgttgacggtatcatcactttcatcgcaacttctccgctgcacctgaaatacaaattcaacaacaaatctctggatgaaatcctggaaatgggcgttgaagcggtagaatacgctaaagagcacggtctgttcgttgcattctctgcagaagatgcaactcgtactccgatcgaagatctgatcaaagttcacaaagcagctgaagaagcgggtgctgaccgcgttcacatcgctgacaccactggctgcgcaactccgcagtctatggaattcatctgcaaaactctgaaagaaaacctgaagaaagcacacatcggcgtacactgccacaacgacttcggtttcgctgttatcaactccatctacggtctgatcggtggtgcgaaagcggtatctactaccgttaacggtatcggtgaacgtgctggtaacgctgcactggaagagctgatcatggcgctgaccgtactgtacgacgttgacctgggtctgaacctggaagttctgccggaactgtgccgtatggttgaagaatactccggtatcaagatgccgaaaaacaagccaatcgttggtgaactggtattcgctcacgaatccggtatccacgttgacgctgttatcgaaaacccgctgacttacgaaccgttcctgccggaaaaaatcggtctgaaacgtaacatcctgctgggtaagcactctggttgccgtgctgttgcttacaagctgaaactgatgggtatcgactacgaccgtgaaatgctgtgcgaaatcgttaagaaagttaaagaaatccgtgaagaaggtaaattcatcactgacgaagttttcaaagagatcgttgaagaagttctgcgtaagcgtaacaaaaactaa

SEQ ID NO: 168 - DNA, 1044 bp, Escherichia coli
atgatgaaagtttgcgttatcgaaggtgacggtatcggtaaagaagttatcccggaagctatcaagatcctgaacgaactgggtgaattcgaaatcatcaaaggtgaagcgggtctggaatgcctgaagaaatacggtaacgcactgccagaagataccatcgaaaaagcgaaagaagctgacatcatcctgttcggtgcaatcacttctccgaagccgggtgaagttcagaactacaaatctccgatcatcactctgcgtaagatgttccacctgtacgctaacgtacgtccgatcaacaacttcggtatcggtcagctgatcggtaagatcgctgactacgagttcctgaacgctaaaaacatcgacatcgttatcatccgtgaaaacactgaagatctgtacgttggtcgtgaacgtctggaaaacgacactgctatcgctgagcgcgttatcactcgtaaaggttctgaacgtatcatccgcttcgcattcgaatacgcaatcaaaaacaaccgtaagaaagtttcctgcatccacaaagctaacgtactgcgtatcactgacggtctgttcctggaagtattcaacgaaatcaagaaacactacaacatcgaagctgacgactacctggttgactccactgcaatgaacctgatcaagcacccggaaaaattcgacgttatcgttaccactaacatgttcggtgacatcctgtctgacgaagcgtctgcactgatcggtggtctgggtctggcaccgtctgctaacatcggtgacgacaaagcgctgttcgaaccggttcacggttctgcaccggatatcgctggtaaaggtatcgctaacccgatggcttctatcctgtctatcgcgatgctgttcgactacatcggtgaaaaagagaaaggcgacctgatccgtgaagcggtaaaatactgcctgatcaacaagaaagttactccggatctgggtggtgacctgaaaaccaaagacgttggtgacgaaatcctgaactacatccgtaagaaactgaaaggttactaa

SEQ ID NO: 169 - DNA, 1263 bp, Escherichia coli
atgactctggttgagaagatcctctccaagaaagttggttacgaagtttgcgcaggcgactccatcgaagttgaagttgacctggcgatgactcacgacggtactactccgctggcttacaaagcgctgaaagagatgtctgactccgtatggaacccggacaagatcgttgttgcattcgaccacaacgtaccgccgaacaccgttaaagcagctgaaatgcagaagctggcgctggaattcgttaagcgcttcggtatcaaaaacttccacaaaggtggtgaaggtatctgccaccagatcctggctgaaaactacgttctgccgaacatgttcgttgctggcggcgactctcacacctgtactcacggtgcattcggtgcattcgcaactggcttcggtgcaactgacatggcttacatctacgcaactggcgaaacctggatcaaagttccgaaaactatccgcgttgatatcgttggtaaaaacgaaaacgtatctgcgaaagacatcgttctgcgcgtttgcaaagaaatcggtcgtcgcggtgcaacttacatggctatcgaatacggtggtgaagttgttaaaaacatggacatggacggtcgtctgactctgtgcaacatggctatcgaaatgggtggtaaaactggcgttatcgaagctgacgaaatcacttacgactacctgaagaaagagcgtggtctgtctgacgaagatatcgctaaactgaagaaagagcgtatcaccgttaaccgtgacgaagctaactactacaaagaaatcgaaatcgacatcactgacatggaagaacaggttgctgtaccgcaccacccggataacgttaagccaatctctgacgttgaaggtactgaaatcaaccaggtattcatcggttcctgcaccaacggtcgtctgtctgatctgcgtgaagctgcgaaatacctgaaaggtcgtgaagttcacaaagacgttaagctgatcgttatcccggcttccaagaaagtattcctgcaggcgctgaaagaaggtatcatcgacatcttcgttaaagcgggtgcgatgatctgtactccgggttgcggtccgtgcctgggtgcacaccagggcgtactggcagaaggtgaaatctgcctgtctactaccaaccgtaacttcaaaggtcgtatgggtcacatcaactcttacatctacctggcttctccgaaaatcgctgctatctctgctgttaaaggttacatcactaacaagctggattaa

SEQ ID NO: 170 - DNA, 513 bp, Escherichia coli
atgatcatcaaaggtcgtgcgcacaagttcggtgacgacgttgacactgacgctatcatcccaggtccgtacctccgtactactgacccgtacgaactggcatctcactgcatggcgggtatcgacgaaaacttcccgaagaaagttaaagaaggtgacgttatcgttgctggcgaaaacttcggttgcggttcttcccgtgagcaggctgttatcgctatcaaatactgcggtatcaaagcggttatcgctaaatctttcgcacgtatcttctaccgtaacgcaatcaacgtaggtctgatcccgatcatcgctaacaccgacgaaatcaaagacggtgacatcgttgaaatcgacctggataaagaagaaatcgttatcactaacaaaaacaaaactatcaagtgcgaaactccgaaaggtctggaacgtgaaatcctggcagctggcggtctggttaactacctgaagaaacgtaagctgattcagtccaagaaaggcgtaaaaacttaa

SEQ ID NO: 171 - DNA, 1221 bp, Saccharomyces cerevisiae
atgaccaaggttttggtcatgttcatggacttcttgtttgaaaactcctggaaggccgtttgtccatacaacccaaagttggacttgaaggacatctacatctacgacaccactttaagagatggtgaacaaaccccaggtgtttgtttcaccaaggaacaaaaattggaaattgccagaaagttggacgaattgggtttgaaacaaatcgaagctggtttcccaatcgtttctgaaagagaagctgacattgtcaagaccattgccaacgaaggtttgaacgctgatatcttagctctatgtagagctttgaagaaggacattgacaaggccatcgaatgtgatgtcgatggtatcatcactttcattgctacttctccattacatttgaaatacaagttcaacaacaaatctttggacgaaatcttggaaatgggtgttgaagctgtcgaatacgccaaggaacacggtttattcgttgctttctctgctgaagatgctaccagaactccaattgaagatttgatcaaggtccacaaggctgctgaagaagctggtgctgaccgtgtccacattgctgacaccactggttgtgccactccacaatccatggaatttatctgtaagactttgaaggaaaacttgaagaaggctcacattggtgttcactgtcacaacgatttcggtttcgctgtcatcaactccatctacggtttgattggtggtgccaaggccgtttccaccaccgtcaacggtatcggtgaaagagctggtaacgctgctttggaagaattgatcatggctttgactgtcttatacgatgtcgatttgggtttgaacttggaagttttgccagaattgtgtagaatggttgaagaatactctggtatcaagatgccaaagaacaagccaattgtcggtgaattggttttcgctcatgaatctggtattcacgttgacgctgtcattgaaaacccattgacctacgaacctttcttgccagaaaagatcggtttgaagagaaacatcctattaggtaagcactctggttgtcgtgctgttgcttacaaattgaaattgatgggtattgactacgacagagaaatgttgtgtgaaattgtcaagaaggtcaaggaaatcagagaagaaggtaagttcatcactgacgaagttttcaaggaaatcgttgaagaagttttgagaaagagaaacaaaaattaa

SEQ ID NO: 172 - DNA, 1263 bp, Saccharomyces cerevisiae
atgactttagtcgaaaagatcttatccaagaaggtcggttacgaagtttgtgccggtgactctattgaagttgaagttgacttggccatgacccacgacggtactaccccattggcttacaaggctttgaaggaaatgtctgactccgtctggaacccagacaagattgttgttgctttcgaccacaacgttccaccaaacaccgtcaaggctgctgaaatgcaaaaattggctttggaatttgtcaagagattcggtatcaagaacttccacaagggtggtgaaggtatctgtcaccaaatcttggctgaaaactacgttttgccaaacatgttcgttgctggtggtgactcccacacttgtacccacggtgctttcggtgcctttgctaccggtttcggtgctactgacatggcttacatctacgctaccggtgaaacctggatcaaggttccaaagactatcagagttgacattgtcggtaagaacgaaaacgtttctgccaaggatatcgtcttgagagtttgtaaggaaattggtagaagaggtgctacttacatggccattgaatacggtggtgaagttgtcaagaacatggacatggacggtagattgactttgtgtaacatggccattgaaatgggtggtaagactggtgtcattgaagctgatgaaatcacctacgactacttgaagaaggaaagaggtctatccgatgaagatatcgccaaattgaagaaggaaagaatcactgttaacagagatgaagctaactactacaaggaaattgaaattgatatcactgacatggaagaacaagttgctgttcctcatcacccagacaatgtcaagccaatttctgacgtcgaaggtactgaaatcaaccaagttttcatcggttcttgtaccaacggtagattatctgatttacgtgaagctgctaagtacttgaaaggtcgtgaagttcacaaggatgtcaaattgattgtcattccagcttccaagaaggttttcttgcaagctttgaaggaaggtatcatcgatatcttcgtcaaggctggtgccatgatctgtaccccaggttgtggtccatgtttgggtgctcatcaaggtgtcttggctgaaggtgaaatctgtttgtccaccaccaacagaaacttcaagggtagaatgggtcacatcaactcttacatctacttggcttctccaaagattgctgccatttctgctgtcaagggttacatcactaacaaattggattaa

SEQ ID NO: 173 - DNA, 513 bp, Saccharomyces cerevisiae
atgatcatcaagggtcgtgctcacaagttcggtgacgatgttgacactgatgctatcattccaggtccatacttgagaaccactgacccatacgaattggcttctcactgtatggctggtattgacgaaaacttcccaaagaaggtcaaggaaggtgatgtcattgttgctggtgaaaactttggttgtggttcttccagagaacaagctgttattgccatcaaatactgtggtatcaaggctgtcattgccaagtctttcgctagaatcttctacagaaacgccatcaacgttggtttgattccaatcattgctaacactgacgaaatcaaggatggtgacattgttgaaatcgatttggacaaggaagaaattgttatcaccaacaagaacaagaccatcaagtgtgaaactccaaagggtttggaaagagaaatcttggctgctggtggtttagtcaactacttgaagaagagaaagttgatccaatccaagaagggtgtcaaaacctaa

SEQ ID NO: 174 - DNA, 1044 bp, Saccharomyces cerevisiae
atgatgaaggtttgtgtcattgaaggtgacggtattggtaaggaagtcattccagaagctatcaagatcttgaatgaattgggtgaatttgaaatcatcaagggtgaagctggtttggaatgtttgaagaaatacggtaacgctttgccagaagataccattgaaaaggccaaggaagctgatatcatcttattcggtgccatcacttctccaaagccaggtgaagttcaaaactacaaatctccaatcatcactttgagaaagatgttccacttgtacgctaacgtcagaccaatcaacaacttcggtattggtcaattgattggtaagattgctgactacgaatttttgaatgccaagaacattgacattgtcatcatcagagaaaacactgaagatttgtacgttggtcgtgaaagattagaaaacgacactgccattgctgaacgtgttatcaccagaaagggttctgaaagaatcatcagattcgctttcgaatacgccatcaagaacaacagaaagaaggtttcctgtatccacaaggctaacgttttgagaatcaccgatggtttattcttggaagttttcaacgaaatcaagaagcactacaacattgaagctgatgactacttggttgactccactgctatgaacttgatcaagcatccagaaaagttcgatgtcattgtcaccaccaacatgttcggtgacatcttatctgacgaagcttctgctttgattggtggtctaggtttggctccatctgccaacattggtgatgacaaggctttattcgaacctgttcacggttctgctccagacattgctggtaagggtattgccaacccaatggcttccatcttgtccattgctatgttgttcgactacatcggtgaaaaggaaaagggtgacttgatcagagaagctgtcaaatactgtttgatcaacaagaaggttactccagatttgggtggtgacttgaaaaccaaggatgtcggtgacgaaatcttgaactacatcagaaagaaattgaaaggctactaa

SEQ ID NO: 175 - DNA, 52 bp, Artificial Sequence
  DC-KdcA-F
aaatttggatccgttgaggaggcctcaaaaatgtatactgttggtgattatc

SEQ ID NO: 176 - DNA, 37 bp, Artificial Sequence
  DC-KdcA-R
aaatttggcgcgccattacttgttctgctccgcaaac

SEQ ID NO: 177 - DNA, 1161 bp, Artificial Sequence
  AksA gene codon pair optimised for E.coli
atggactggaaagcggtatctccgtacaacccgaaactgaacctgaaagactgctacctgtacgacaccactctgcgtgacggcgagcagactccgggcgtttgcttcactcacgaccagaaactggaaatcgcgaagaaactggacgaactgaaaatcaagcagatcgaagctggcttcccgatcgtttctgaaaacgaacgtaaagcaatcaagtctatcaccggtgaaggtctgaacgctcagatcctggcactctctcgcgtactgaaagaagatatcgacaaagcaatcgaatgcgacgttgacggtatcatcactttcatcgctgcttctccgatgcacctgaaatacaaactgcacaaatctctggatgaagttgaagagatgggtatgaaagcggtagaatacgctaaagaccacggtctgttcgttgcattctctgctgaagatgcaactcgtactccggttgaagatctgatccgtatccacaaaaacgctgaagagcacggtgctaaccgcgttcacatcgctgacactctgggttgcgcaactccgcaggcaatgtaccacatctgctctgaactgtcctccaacctgaagaaagcgcacatcggtgttcactgccacaacgacttcggtttcgctgttatcaactccatctacggtctgatcggtggtgcgaaagcggtatctactaccgttaacggtatcggtgaacgtgctggtaacgctgctatcgaagaaatcgttatggcgctgaaagttctgtacgaccacgacatgggtctgaacactgaaatcctgactgaaatctccaagctggttgaaaactactccaagatccgtatcccggaaaacaagccgctggttggtgaaatggcattctaccacgaatccggtatccacgttgacgctgttctggaaaacccgctgacttacgaaccgttcctgccagaaaaaatcggtcagaagcgtaagatcatcctgggtaagcactctggttgccgtgctgttgctcaccgtctgcaggaactgggtctggaagcatctcgtgaagagctgtgggaaatcgttaagaaaaccaaagaaactcgtgaagaaggtactgaaatctctgacgaagtattcaaaaacatcgttgacaaaatcattaaataa

SEQ ID NO: 178 - DNA, 1020 bp, Artificial Sequence
  AksF gene codon pair optimised for E.coli
atgcgtaacactccgaaaatctgcgttatcaacggtgacggtatcggtaacgaagttatcccggaaaccgttcgcgtactgaacgaaatcggtgacttcgaattcatcgaaactcacgctggttacgaatgcttcaagcgctgcggtgacgctatcccggaaaaaactatcgaaatcgctaaagagtctgactccatcctgttcggttctgtaactactccgaagccgactgaactgaaaaacaagccgtaccgttctccgattctgactctgcgtaaagagctggatctgtacgctaacatccgtccgactttcaacttcaaaaacctggacttcgttatcatccgtgaaaacactgaaggtctgtacgttaagaaagaatactacgacgaaaaaaacgaagttgcaactgctgaacgtatcatctccaaattcggttcttcccgtatcgttaagttcgcattcgactacgcactgcagaacaaccgtaagaaagtttcctgcatccacaaagctaacgttctgcgtatcactgacggtctgttcctgggcgtattcgaagaaatctccaagaaatacgagaagctgggtatcgtttctgacgactacctgatcgacgcaactgcgatgtacctgatccgtaacccgcagatgttcgacgtaatggttaccactaacctgttcggtgacatcctgtctgacgaagctgctggtctgatcggtggtctgggtatgtccccgtctgctaacatcggtgacaaaaacggtctgttcgaaccggttcacggttctgcaccggatatcgctggtaaaggtatctccaacccaatcgcgactatcctgtctgctgcaatgatgctggatcacctgaaaatcaacaaagaagctgaatacatccgtaacgctgttaagaaaaccgttgaatgtaaatacctgactccggacctgggtggtcacctgaaaacttctgaagttactgaaaaaatcatcgaatccatcaaatctcagatgattcagtaa

SEQ ID NO: 179 - DNA, 1257 bp, Artificial Sequence
  AksD gene codon pair optimised  for E. coli
atgactctggctgaaaaaatcatctccaaaaacgttggtaaaaacgtttacgctggcgactccgttgaaatcgacgttgacgttgcgatgactcacgacggtactactccgctgaccgttaaagcattcgagcagatctctgacaaagtatgggataacgaaaaaatcgttatcatcttcgaccacaacatcccggctaacacctctaaagctgctaacatgcaagttatcactcgtgaattcatcaagaagcagggtatcaaaaactactacctggacggtgaaggtatctgccaccaggttctgccggaaaaaggtcacgttaagccgaacatgatcatcgctggtgctgactctcacacctgtactcacggtgcattcggtgcattcgcaactggcttcggtgcaactgacatgggttacgtttacgcaactggtaaaacctggctgcgcgtaccagaaaccattcaggttaacgtaactggcgaaaacgaaaacatctccggtaaagacatcatcctgaaaacctgtaaagaagttggtcgtcgcggtgcaacttacctctctctggaatacggtggtaacgcggtacagaacctggatatggacgaacgtatggttctgtctaacatggctatcgaaatgggtggtaaagcgggtatcatcgaagctgacgacaccacttacaaatacctggaaaacgctggcgtttcccgtgaagaaatcctgaacctgaagaaaaacaagatcaaagttaacgaatctgaagaaaactactacaaaactttcgagttcgacatcactgacatggaagagcagatcgcttgcccgcaccacccggacaacgttaaaggcgtttctgaagtttctggtatcgaactggatcaggtattcatcggttcctgcaccaacggtcgtctgaacgatctgcgtatcgctgcgaagcacctgaaaggtaagaaagttaacgaatccactcgtctgatcgttatcccggcttccaagtctatcttcaaagaagcgctgaaagaaggtctgatcgacaccttcgttgactccggtgcgctgatctgtactccgggttgcggtccgtgcctgggtgcacaccagggcgtactgggtgacggtgaagtttgcctggcaactaccaaccgtaacttcaaaggtcgtatgggtaacaccaagtctgaagtttacctctcttctccggcaatcgctgcgaagtctgctgttaaaggttacatcactaacgagtaa

SEQ ID NO: 180 - DNA, 486 bp, Artificial Sequence
  AksE gene codon pair optimised  for E. coli
atgaagatcaccggtaaagttcacgtattcggtgacgacatcgacactgacgctatcattccgggtgcttacctgaaaaccactgacgaatacgaactggcttctcactgcatggcgggtatcgacgaagatttcccggaaatggttaaagaaggtgacttcctggttgctggcgaaaacttcggttgcggttcttcccgtgagcaggcaccgatcgctatcaaatactgcggtatcaaagcaatcatcgttgaatccttcgcacgtatcttctaccgtaactgcatcaacctgggcgtattcccgatcgaatgtaaaggtatctccaagcacgttaaagacggtgacctgatcgaactggatctggaaaacaagaaagttatcctgaaagacaaagttctggactgccacatcccgactggtactgcgaaagacatcatggacgaaggtggtctgatcaactacgctaagaagcagaaaaactaa

SEQ ID NO: 181 - DNA, 1161 bp, Artificial Sequence
  AksA Methanococcus maripaludis
atggattggaaagctgtatctccgtacaaccctaaattaaatttgaaagactgttatttgtatgatacgacattgagagatggtgaacagactcccggagtttgttttacacatgatcaaaaacttgagatcgccaaaaaactggatgaacttaaaattaaacagatcgaagcgggttttccaattgtttctgaaaacgagagaaaagccatcaaatcaattactggcgaaggattaaatgcacaaattttggcgttatcaagagttttaaaagaggatattgataaagccattgaatgtgatgttgatggaataattacattcattgcagcttcaccaatgcatttgaaatacaaattgcacaaaagcctcgatgaagtcgaagaaatgggtatgaaagccgttgaatacgcaaaagatcacggacttttcgtagcattctctgcagaagatgcgacaagaactcctgttgaagacctcatcagaatccacaaaaatgcagaagaacacggtgccaatagggtgcatattgcagataccctcgggtgtgcaacaccacaggcaatgtatcatatctgctctgaattaagcagtaacttgaaaaaagcacatatcggggtacactgtcacaacgactttgggttcgcagttataaactcgatatacggattaattggtggagcaaaagcggtatctacaacagttaacggaataggcgaaagagcaggaaatgctgcaattgaagaaattgtaatggcattgaaagtactttacgaccacgatatgggattaaatactgaaatactaactgaaatatcgaaactcgttgaaaactattcaaaaattaggattcccgaaaataaacctcttgttggggaaatggcattttaccatgaaagcggaatacatgttgatgcggttttagagaatcctttaacgtatgaaccgtttttacctgaaaaaataggtcaaaaaagaaaaattatacttggaaaacattccggatgcagagcagttgcacacagactgcaagaacttgggcttgaagcttcaagagaagaactttgggaaattgtgaaaaaaactaaagaaaccagagaagaaggtactgaaataagcgacgaagtgtttaaaaacattgtcgataagattataaaataa

SEQ ID NO: 182 - DNA, 1020 bp, Artificial Sequence
  AksF Methanococcus maripaludis
atgagaaacactcccaaaatttgtgttattaatggagatggcattggaaacgaagtgattcctgaaacagtgcgcgtcttgaatgaaattggggattttgaatttatagaaacacatgcgggctacgaatgttttaaaagatgtggcgatgcgatacctgaaaagaccatagaaattgcaaaagaatctgattctattctttttggatctgttactaccccaaaaccaactgaattaaaaaataaaccctatagaagtccaatattaactttaagaaaagaactcgacctttatgcaaatataagaccgactttcaacttcaaaaaccttgattttgtgataattcgcgaaaataccgaaggtctttatgtgaaaaaagaatattacgacgaaaaaaatgaagttgcgactgctgaacgaattatttctaaatttggaagctcgagaattgtaaaatttgcttttgattatgcacttcaaaacaatagaaaaaaagtatcctgtattcacaaagcaaatgttttgaggatcacagatgggttattcctaggggtatttgaagaaatatcgaaaaaatatgaaaaattgggaatagtgtctgatgactatttgattgatgcaacagcgatgtatttaattagaaatccgcaaatgtttgatgtcatggttacaacaaatttatttggagatattttatcggatgaagctgctggacttatcggaggacttggaatgtctccttcagcaaatattggtgacaaaaacggattattcgaaccagtgcatggatccgcaccagatattgctggaaaaggaatttcaaacccgattgcaacaattttaagtgctgcaatgatgcttgatcatttaaaaataaataaagaagcggaatacataagaaatgcagttaaaaaaactgttgaatgtaaatacctaactccggatcttgggggacacttaaaaacttctgaagttacagaaaaaatcattgaatcaataaaatctcaaatgattcaatga

SEQ ID NO: 183 - DNA, 1257 bp, Artificial Sequence
  AksD Methanococcus maripaludis
atgacacttgctgaaaaaatcatttctaaaaatgttggaaaaaatgtttacgcgggcgatagcgttgaaatagacgtggatgtcgcaatgacgcatgacgggactacccctcttacagtaaaagcttttgagcagatttcagacaaagtttgggataatgaaaagatagttattatttttgaccacaacatccctgcaaacacgtcaaaagctgcgaatatgcaggttataacgagagaatttatcaaaaaacagggaattaaaaattattaccttgatggcgaaggaatatgtcatcaggtacttcctgaaaaaggccacgtgaagccaaacatgataattgcaggagctgacagtcacacctgtactcatggggcattcggtgcttttgcgacaggttttggtgcaactgacatgggttacgtctatgcaaccggaaaaacatggcttagagttcctgaaaccattcaagtaaatgtaaccggagaaaatgaaaatatttctggaaaggacattatcttaaaaacttgtaaggaagttggaagacgtggagcgacatacctgtctttagaatacggcggaaatgcagtccaaaatcttgacatggacgaaagaatggttttatcgaacatggccattgaaatgggcggaaaagctggaattatcgaagctgacgatactacttacaaataccttgaaaatgcaggagtttcaagagaagaaattcttaacttgaaaaaaaataaaataaaagttaatgaatccgaagaaaattactacaaaacatttgaatttgatataaccgatatggaagaacagattgcttgcccgcaccaccctgacaatgtaaaaggagtttctgaagtatcaggaattgaattagatcaggtattcatcggatcttgtacaaacggaagattaaacgatttaagaattgctgcaaaacatttgaaaggaaaaaaagttaatgaaagcacccgactaattgtaattcctgcatcaaaatcaatctttaaagaagcgttaaaagaaggattaatcgatacttttgtagattctggagcattaatctgcactcctggatgcggaccatgccttggagcccatcagggtgttttaggtgatggggaagtatgtcttgctacaaccaataggaactttaaaggaagaatgggaaacacaaaatcggaagtttacctctcatctcctgcaatagctgcaaaatccgcagttaaaggatacattaccaatgaataa

SEQ ID NO: 184 - DNA, 486 bp, Artificial Sequence
  AksE Methanococcus maripaludis
atgaaaataacaggcaaggtgcacgtatttggggatgacatcgacacagatgcgataattcctggcgcttatttaaaaacaactgatgaatatgagcttgcatcacactgtatggctggaatcgatgaagattttccagaaatggtcaaagaaggcgactttttggtagcaggtgagaatttcggatgcggaagttcgagagagcaagctccaattgcaataaaatactgcggaatcaaggcaataattgttgaaagttttgcaaggatattttatagaaattgtattaatcttggagtttttccaattgaatgcaaaggaatatcaaaacacgtgaaagatggagatttaatagaattggatctcgaaaataaaaaagtaattttaaaggacaaggttctagactgccacattccaaccggaactgcaaaagacataatggatgaaggcgggcttataaattacgcaaagaaacagaaaaactaa

SEQ ID NO: 185 - DNA, 1251 bp, Methanobrevibacter smithii ATCC35061
  CDS (1)..(1251)
atgaacatcaccgagaagatcctgtctgctaaagcgaagaaagaagttactccgggtgaaatcatcgaaatcccggttgatctggcgatgtctcacgacggtacttctccgccagcaatcaaaactttcgaaaaagttgcgactaaagtatgggacaacgagaagattgctatcgtattcgaccacaacgtaccggctaacaccatcggttctgctgaattccagaaagtttgccgcgatttcatcaagaagcagaagatcaccaaaaactacatccacggtgacggtatctgccaccaggtactgccggaaaaaggtctggttgaaccgggtaaagttatcgttggtgctgactctcacacttgcacttacggtgcttacggcgcattctctaccggtatgggtgcgactgacctggcgatggtttacgcaactggtaaaacctggttcatggttccggaagctatcaagatggaagtttctggtgaactgaactcttacactgcaccgaaagacatcatcctgaaaatcatcggtgaagttggtattgctggcgcaacttacaaaactgcagaattctgcggtgaaaccattgagaagatgggcgtagaaggtcgtgcgactatctgcaacatggctatcgaaatgggtgcgaaaaacggtatcatggaaccgaacaaagaagttatccagtacgtttctcagcgtactggtaagaaagagtctgaactgaacatcgttaagtctgacgaagatgctcagtactctgaagaaatgcacttcgacatcactgacatggaaccgcagatcgcttgcccgaacgacgttgataacgttaaagacatctccaaagttgaaggtactgcggttgatcagtgcctgatcggttcctgcaccaacggtcgtctgtctgacctgaaagacgcttacgaaatcctgaaagacaacgaaatcaacaacgacactcgcctgctgattctgccggcatctgcagaaatctacaagcaggctatccacgaaggttacatcgacgcattcatcgacgctggtgctatcatctgcaacccaggttgcggtccgtgcctgggtggtcacatgggcgtactgtctgaaggtgaaacttgcctgtctaccactaaccgtaacttcaaaggtcgtatgggcgacccgaaatcttccgtttacctggctaactccaaagttgttgctgcatctgcaatcgaaggtgttatcactaacccgaaagacctg

SEQ ID NO: 186 - protein, 417 aa, Methanobrevibacter smithii ATCC35061; identical to SEQ ID NO: 21

SEQ ID NO: 187 - DNA, 1254 bp, Methanobrevibacter smithii ATCC35061
ttgaatattacagaaaaaatattatcagctaaagcaaaaaaagaggttacacccggagaaattattgaaattccggttgatttagctatgtctcatgacggaacatcaccaccagctataaaaacctttgaaaaagtagctaccaaagtctgggacaatgaaaaaattgcaattgtatttgaccataatgttcctgcaaatacaatcggatctgcagaattccagaaagtatgcagagacttcataaaaaaacagaaaattactaaaaattacatacatggtgacggaatatgccaccaggtacttcctgaaaaaggactggtagaacctggaaaagttattgtaggtgctgactcacacacatgtacttatggtgcatatggagcattttcaacaggaatgggtgctactgatttagctatggtttatgctacaggtaaaacatggtttatggttcctgaagctattaaaatggaagtcagcggagagttaaattcatacactgctccaaaagacatcattttaaaaatcatcggtgaagtgggaatagctggagctacctacaaaactgcagaattctgcggagaaaccatcgaaaaaatgggagtagaaggcagagctacaatatgtaacatggctattgaaatgggagctaaaaacggaataatggaaccgaataaagaagttatccaatatgtttcccaaagaaccggaaaaaaagaaagtgaattgaatattgttaaatccgatgaagatgcacagtattcagaagaaatgcactttgacataactgatatggaacctcaaatagcctgccctaatgatgtagacaatgttaaagacatctccaaagttgaaggcacagctgttgaccaatgcttaatcggttcttgtacaaacggcagattatctgatttgaaagatgcttatgaaatcttaaaagataatgaaattaataatgatactagattactaattcttccagcatcagctgaaatttacaaacaggcaatccatgaaggatacattgatgcatttatagatgcgggagctattatatgcaatccaggatgcggaccatgtcttggaggacatatgggagttttatctgaaggtgaaacctgcctatccacaacaaacaggaatttcaaaggaagaatgggggatccgaaatcctcagtatatctggctaattcaaaggttgttgctgcttcagctattgaaggagttattacaaatcctaaagatttatag

SEQ ID NO: 188 - DNA, 1254 bp, Methanococcus vannielii SB
  CDS (1)..(1254)
atgactctggctgaagctatcctgtccaagaaactgggtaaaaacgtttacgctaaagactccgttgaaatcgacgttgatctggcaatgactcacgacggtactactccgctgaccgttaaagcgttcgaagagatctctgaccgcgtattcgacaacaagaagatcgttatcgttttcgaccacaacatcccggctaacacctctaaagcggcaaacatgcagatcatcactcgcgacttcatcaagaagcacgacatcaaaaactactacctggatggtgaaggtatctgccaccagattctgccggaaaaaggtcacgttaagccgaacatggttatcgttggtgctgactctcacacttgcactcacggtgcgttcggtgcattcgcaactggcttcggtgcttctgacatgggttacgtttacgcaactggtaaaacctggttccgcgtaccggaaaccatccgcgttaacgtaactggtaaaaacgaaaacatctccggtaaagatatcgttctgaaaacttgcaaagaagttggtcgttctggtgcaacttacatggcgctggaatacggtggttctgctgttaaagcgctgaacatggacgaacgtatggtactgtgcaacatggctatcgaaatgggtggtaaagttggtctgattgaagctgaccacaccacttacgactacctgaaaaacgctggcgtatctaaccaggaaatcgctgaactgcagcgtaacaagatctccatcactgaaaacgaagaaacttacttcaaaaccgttgagttcgacatcactgacatggaagaacaggttgcttgcccgcaccacccggataacgttaaaggtatctctgaagttctgggtactccgatcgaccagattttcatcggttcctgcaccaacggtcacatcggcgatctgcgtatcgctgcgaagattctgaaaggtaagtctatcaacaaaaacacccgtctgatcgttatcccggcttctaaatctatcctgaagcaggcgctgaacgaaggtctgatcgacatcttcgttgacttcggtgcgctgatctgcgcaccaggttgcggtccgtgcctgggtgcacacgaaggcgtactgggtgacggtgaagtttgcctggcaactaccaaccgtaacttcaaaggtcgtatgggtaacatcaactctgaagtttacctgtcctctccggcaatcgctgctaaatctgctatcaaaggtcacatcactaacgag

SEQ ID NO: 189 - protein, 418 aa, Methanococcus vannielii SB; identical to SEQ ID NO: 22

SEQ ID NO: 190 - DNA, 1257 bp, Methanococcus vannielii SB
atgacacttgctgaagcaattctttcaaaaaaacttggaaaaaatgtatatgctaaagatagcgttgaaatagacgtcgaccttgcaatgacccatgatggaactacgccattgactgtaaaagctttcgaagaaatttcagacagggtttttgataataaaaaaatagtaatagtttttgaccataatattccagcaaatacgtcaaaagcagcaaatatgcagattataacaagagacttcattaaaaaacacgacattaaaaactactatcttgatggagaaggaatatgtcatcaaatacttcctgaaaaaggccatgtaaagccaaacatggtaatcgttggtgcagatagccatacctgtacccatggggcatttggggcttttgcaacgggttttggtgcaagcgacatgggttacgtttatgctactggaaaaacatggtttagagttcctgaaacaatacgggtgaatgttactggtaaaaacgaaaatatttccggaaaggacattgttttaaaaacctgtaaagaagttggaagaagtggtgcaacatatatggcattggaatacggaggaagtgctgtaaaagccctaaacatggatgaaagaatggttttatgcaatatggcaattgaaatgggcggaaaagttggattaattgaagcagaccatacaacttacgattaccttaaaaatgcaggcgtttccaatcaagaaatagccgaattacaaagaaacaaaatttcaattactgaaaatgaagaaacatactttaaaactgttgaatttgatataactgacatggaagaacaagttgcatgcccacatcatcccgataatgtaaaaggtatttctgaggttttaggtactcctattgaccaaatatttatcggttcttgtacaaatgggcatataggcgaccttagaattgctgcaaaaattttaaaaggaaaatccataaataaaaatacaaggcttatagtaattcctgcatctaaatcgatacttaaacaggccctaaatgaaggattaattgatatttttgtggattttggtgcattaatctgtgctccaggatgcggcccttgccttggcgcacatgaaggggtacttggcgatggtgaagtatgtcttgcaactacaaaccgcaactttaaaggaagaatgggaaacattaattcagaggtatatttatcttctccagcaattgctgcaaaaagtgcaattaaagggcatattacaaacgaataa

SEQ ID NO: 191 - DNA, 1263 bp, Methanococcus aeolicus Nankai 3
  CDS (1)..(1263)
atgactctggctgaagaaatcctgtccaagaaagttggtaagaaagttaaagcgggtgacgttgttgaaatcgatatcgacctggcgatgactcacgacggtactactccgctgtctgcgaaagcattcaagcagatcactgacaaagtatgggataacaagaaaatcgttatcgttttcgaccacaacgttccggctaacaccctgaaagctgctaacatgcagaagatcactcgcgaattcatcaaagagcagaacatcatcaaccactacctggacggtgaaggtgtttgccaccaggtactgccggaaaacggtcacattcagccgaacatggttatcgctggcggcgattctcacacctgtacttacggcgcattcggtgcgttcgctactggcttcggtgcaactgacatgggtaacatctacgcaactggtaaaacctggctgaaagttccgaaaactattcgtatcaacgttaacggtgaaaacgacaagatcaccggtaaagacatcatcctgaaaatctgcaaagaagttggtcgttctggtgcaacttacatggcgctggaatacggtggtgaagcaatcaagaaactgtctatggacgaacgtatggttctgtctaacatggctatcgaaatgggtggtaaagttggtctgatcgaagctgacgaaaccacttacaactatctgcgtaacgttggtatttctgaagagaagatcctggaactgaagaaaaaccagatcactatcgacgaaaacaacatcgacaacgacaactactacaaaatcatcaacatcgacatcactgacatggaagaacaggttgcttgcccgcaccacccggataacgttaaaaacatctctgaagttaaaggcgcaccaatcaaccaggtattcatcggttcctgcaccaacggtcgcctgaacgatctgcgcattgcttctaaatacctgaaaggtaagaaagttcacaacgacgtacgtctgatcgttatcccggcttccaagtctatcttcaagcaggcgctgaaagaaggtctgatcgacatcttcgttgacgctggcgcgctgatctgcactccgggttgcggtccgtgcctgggtgcacaccagggcgtactgggtgacggtgaagtttgcctggcaactaccaaccgtaacttcaaaggtcgtatgggtaacaccactgctgaaatctacctgtcctctccggcaatcgctgctaaatctgctatcaaaggttacatcactaacgag

SEQ ID NO: 192 - protein, 421 aa, Methanococcus aeolicus Nankai 3; identical to SEQ ID NO: 23

SEQ ID NO: 193 - DNA, 1266 bp, Methanococcus aeolicus Nankai 3
atgacattggcagaggaaatattatcaaaaaaagtaggaaaaaaagtaaaagcaggagatgttgtagaaatagatatagatttagcaatgactcatgatggaacaacaccattatctgcaaaggcatttaaacagataaccgataaggtatgggacaataaaaaaatagtcatagtatttgaccataatgtcccagcaaatacattaaaagccgcaaatatgcaaaaaattacacgagaatttataaaagaacaaaatataataaatcattatttggatggtgaaggcgtatgccatcaagtgctacctgaaaacggacatatacaaccaaacatggttatagctggtggagatagtcacacatgcacctatggggcatttggggcatttgcaacaggatttggggctaccgacatggggaatatatatgcaacaggaaaaacttggttaaaagttccaaaaaccataagaataaatgttaatggagaaaatgataaaattactggaaaagatattattttaaaaatttgtaaagaagttggacgaagtggagctacttacatggcacttgaatacggcggggaagcaataaaaaaattaagtatggacgaaagaatggttttaagcaatatggctatcgaaatgggcggaaaagttgggcttatcgaagccgatgaaaccacatataattaccttagaaatgtaggaattagtgaagaaaaaatattagaattgaaaaaaaatcaaataaccattgatgagaacaatatagataatgataattattataaaattataaatatagatattacagacatggaggagcaagtggcatgccctcaccatcccgataatgttaaaaatatttcggaagtaaaaggagctcccataaatcaggtgttcataggttcatgcacaaatggtaggttgaacgatttaagaatagcctcaaaatatttaaaaggaaaaaaggttcataatgatgttagattaatagtaatacctgcttcaaaatcaatatttaaacaggcattaaaagaaggattaattgatatttttgtagatgctggagctttaatttgcacccccggatgcggtccttgtttgggggcccaccaaggagttttaggagatggtgaagtttgtttagccaccacaaatagaaatttcaaaggaagaatgggaaatacgacagcggaaatatatttatcctcccccgctattgccgcaaaaagtgcaattaaaggatatatcacaaatgaataa

SEQ ID NO: 194 - DNA, 1254 bp, Methanococcus maripaludis S2
  CDS (1)..(1254)
atgactctggctgagaagatcatctccaaaaacgttggtaaaaacgtttacgcgaaagactccgttgaaatctccgttgacatcgcgatgactcacgacggtactactccgctgaccgttaaagcgttcgaacagatctctgacaaagtatgggataacgagaagatcgttatcatcttcgaccacaacatcccggctaacacctctaaagctgctaacatgcaagttatcactcgtgaattcatcaagaagcagggtatcaaaaactactacctggatggtgaaggtatctgccaccaggtactgccggaaaaaggtcacgttaagccgaacatgatcatcgctggcgcagactctcacacttgcactcacggtgcattcggtgcattcgctaccggtttcggtgcaactgacatgggttacgtttacgcaactggtaaaacctggctgcgcgtaccggaaaccattcgcgttaacgtaactggcgaaaacgaaaacatctccggtaaagacatcatcctgaaaacttgcaaagaagttggtcgtcgcggtgcaacttacatgtctctggaatacggtggtaacgctgttcacaacctgtctatggacgaacgtatggttctgtctaacatggctatcgaaatgggtggtaaagctggtatcatcgaagctgacgacaccacttaccgctacctggaaaacgctggcgtttcccgtgaagaaatcctggaactgaagaaaaacaagatcaccgttgacgaatctgaagaagattactacaaaactattgaattcgacatcaccggtatggaagaacaggttgcttgcccacaccacccggacaacgttaaaggcgtttctgaagttgaaggtactgaactgaaccaggtattcatcggttcctgcaccaacggtcgtctgaacgatctgcgtattgctgcgaaatacctgaaaggtaagaaagttaacgaaaacacccgtctgatcgttatcccggcatctaaatctatcttcaaagaagcgctgaacgaaggtctgatcgacatcttcgttgactccggtgcactgatctgcactccgggttgcggtccgtgcctgggtgcacaccagggcgttctgggtgacggtgaagtttgcctggcaaccactaaccgtaacttcaaaggtcgtatgggtaacaccaacgctcaggtttacctgtcctctccgaagatcgctgcgaagtctgcggtaaaaggttacatcactaatgag

SEQ ID NO: 195 - protein, 418 aa, Methanococcus maripaludis S2; identical to SEQ ID NO: 16

SEQ ID NO: 196 - DNA, 1257 bp, Methanococcus maripaludis S2
atgacacttgctgagaaaatcatttcaaaaaatgttggaaaaaatgtttacgccaaagacagcgtcgaaataagcgtagatattgcaatgacacatgacgggaccaccccgcttacggtaaaagcctttgagcagatttcagataaagtatgggataatgaaaagatagtcattatttttgaccacaatatccctgcaaacacgtcaaaagctgcaaatatgcaggttataacgagagaattcataaaaaagcaggggattaaaaattactacctcgatggcgaaggaatatgccatcaagttctacctgaaaagggccatgtaaaaccaaacatgataattgcgggagctgacagccacacatgtactcatggggcctttggagcatttgctacaggttttggtgctacagacatgggttacgtctatgcaacaggaaaaacctggcttagagttcctgaaactatccgcgtaaatgtaactggagaaaatgaaaatatttctggaaaagacattattttaaaaacttgtaaggaagttggaagacgtggggctacgtacatgtctttagaatacggtggaaatgcagtccacaatctttcaatggatgaaagaatggttctgtcaaacatggctattgaaatgggcggaaaagcaggaattatcgaagctgatgatactacatatagatatcttgaaaatgcaggagtttcgcgcgaagaaattcttgaattgaaaaaaaataaaataacagttgatgaatccgaagaagactactacaaaacaattgaatttgacataaccggtatggaagaacaggttgcatgccctcaccaccctgataacgtaaaaggagtttcagaagttgaaggaacagaattaaaccaggtattcatcggttcatgcacaaacggaagattaaacgacttaagaattgctgcaaaatatttgaaaggaaaaaaagttaatgaaaacacaagattaattgtaatccctgcatcaaagtcaatatttaaagaagccctaaatgaaggattaattgatatctttgtagattccggagcattaatatgtacccctggatgcggaccatgtcttggagcccatcagggggttttaggtgatggagaagtatgccttgctacaactaaccggaactttaaaggaagaatgggaaacacgaacgcacaagtttacctctcttctccaaaaatagctgcaaaatctgcggttaaaggctacattacaaatgaataa

SEQ ID NO: 197 - DNA, 483 bp, Methanobrevibacter smithii ATCC35061
  CDS (1)..(483)
atggacatcatcaaaggtaaaacctggactttcggtgaaaacatcgacactgacgttatcatcccaggtcgttacctccgcactttcaacccgcaggacctggcagaccacgtactggaaggtgaacgtccggacttcaccaagaacgttaagaaaggcgacatcatcgttgctgacgaaaacttcggttgcggttcttctcgcgaacaggcaccggttgctatcaaaactgctggcgttgatgctatcgttgcgaagtctttcgcacgtatcttctaccgtaacgctatcaacatcggtctgccggttatcgtttgcgacattcaggcgaaagacggtgacatcatcaacatcgacctgtctaaaggtattctgactaacgaaaccactggcgaatccgtaactttcgaaccgttcaaagagttcatgctggatatcctggaagataacggtctggttaaccactacctgaaagaaaaacag

SEQ ID NO: 198 - protein, 161 aa, Methanobrevibacter smithii ATCC35061; identical to SEQ ID NO: 31

SEQ ID NO: 199 - protein, 486 aa, Methanobrevibacter smithii ATCC35061
ATGGATATAATTAAAGGAAAAACATGGACTTTTGGTGAAAATATTGATACGGATGTTATTATTCCCGGAAGATATTTGAGAACCTTTAATCCTCAAGATTTGGCTGATCATGTACTTGAAGGAGAACGTCCAGATTTTACAAAGAATGTTAAAAAAGGAGACATAATAGTAGCTGATGAAAATTTTGGTTGCGGTTCATCAAGAGAGCAGGCTCCAGTAGCTATTAAAACTGCAGGTGTAGATGCTATTGTGGCTAAATCTTTCGCCAGAATTTTTTACAGAAATGCAATTAACATTGGATTGCCAGTAATTGTTTGTGATATTCAGGCAAAAGACGGAGATATTATAAACATTGATTTGTCAAAAGGAATATTAACTAATGAAACTACTGGTGAATCAGTTACTTTTGAACCTTTTAAAGAGTTTATGTTAGATATTTTAGAAGATAATGGTCTTGTTAATCATTATCTAAAAGAAAAACAATAA

SEQ ID NO: 200 - DNA, 483 bp, Methanococcus vannielii SB
  CDS (1)..(483)
atgaagctgaaaggtaaagcgcacgtattctctgacgacgttgatactgacgcaatcattccgggtgcttatctgcgtactactgacgtttacgaactggcatctcactgcatggctggtatcgacgaaaacttcccgaagaaagttaacctgggtgacttcatcgttgctggcgaaaacttcggttgcggttcttcccgtgaacaggcaccgatctccatcaaatacctgggtatctccgcaatcatcgctgaatccttcgctcgcattttctaccgtaactccatcaacctgggtgttatcccgatcgaatgcaaaaacatctccaagcacgttaaaactggcgacctgatcgaactggatctggaaaacaagaaaatcatcctgaaagacatcgttctggaatgcaccgtaccgactggtaaagcgaaagagatcatcgacctgggtggtctgatcaactacgctaaagcgcagatgggt

SEQ ID NO: 201 - protein, 161 aa, Methanococcus vannielii SB; identical to SEQ ID NO: 32

SEQ ID NO: 202 - DNA, 486 bp, Methanococcus vannielii SB
atgaaattaaaaggcaaagcacacgtattttcagatgatgtcgataccgatgctataattccaggagcatatctaagaactactgatgtttatgaacttgcatcgcactgtatggcggggattgatgagaattttcctaaaaaagtaaatttgggggattttattgttgcaggtgaaaattttggctgtggaagttcaagggaacaggctccaatttcgataaaatatcttggaataagtgcaataattgcggaaagttttgcaagaattttttatcgaaattctataaacttaggtgtaattccaattgaatgcaaaaacatttcaaaacacgttaaaacaggggatttaatagaattagaccttgaaaacaaaaaaatcattttaaaagacattgttttagaatgcacggttccaactggaaaggcaaaagaaataattgatttaggcgggcttataaattatgcaaaagcgcaaatgggctaa

SEQ ID NO: 203 - DNA, 495 bp, Methanococcus aeolicus Nankai 3
  CDS (1)..(495)
atgatcatcaaaggtaacatccacctgttcggtgacgacatcgacactgacgctatcatcccaggtgcttacctgaaaaccactgacccgaaagagctggcatctcactgcatggcgggtatcgacgaaaaattctctaccaaagttaaagacggtgacatcatcgttgctggcgaaaacttcggttgcggttcttcccgtgaacaggcaccgatctccatcaagcacaccggtatcaaagcggttgttgctgaatccttcgctcgcattttctaccgtaactgcatcaacatcggtctgatcccgatcacctgtgaaggtatcaacgaacagattcagaacctgaaagacggtgacaccatcgaaatcgatctgcagaacgaaaccatcaagatcaactccatgatgctgaactgcggtgcaccgaaaggtatcgaaaaagaaatcctggatgctggcggtctggtacagtacaccaagaacaagctgaagaaa

SEQ ID NO: 204 - protein, 165 aa, Methanococcus aeolicus Nankai 3; identical to SEQ ID NO: 33

SEQ ID NO: 205 - DNA, 498 bp, Methanococcus aeolicus Nankai 3
atgataataaaaggaaatattcatttatttggtgatgatattgataccgatgccataattcccggggcctaccttaaaacaacagacccaaaggagttggcatctcattgcatggctggaattgatgaaaaattttcaacaaaggtaaaagacggcgatataattgttgcaggtgaaaattttggctgtggaagtagtagggaacaggcaccaatatccataaaacacaccggaataaaggcagtagttgctgaaagttttgcacggatattttatagaaattgtattaatataggattaatacctataacttgcgaaggaataaatgaacaaatccaaaacctaaaagatggcgacacaatagaaattgatttgcaaaatgaaacaataaaaataaattctatgatgttaaattgtggagctcccaaagggatagaaaaagaaattttagatgctggtggattagtacaatatacaaaaaataagttaaaaaaataa

SEQ ID NO: 206 - DNA, 483 bp, Methanococcus maripaludis S2
  CDS (1)..(483)
atgaagatcaccggtaaagttcacctgttcggtgacgacatcgacactgacgctatcattccgggtgcttacctgaaaaccactgacgaatacgaactggcttctcactgcatggcgggtatcgacgaaaacttcccggaacgcgttgaagatggcgacttcctggttgctggcgaaaacttcggttgcggttcttcccgtgaacaggcaccgattgctatcaaatactgcggtatcaaagcaatcatcgttgaatccttcgcacgtatcttctaccgtaactgcatcaacctgggcgtattcccgatcgaatgcaaaggtatctccaagcacgttaaagacggtgacgttatcgaactggatctggaagagaagaaagttatcctgaaagacaccgtactggactgcaacctcccgactggtactgcgaaagatatcatggacgaaggtggtctgatcaactacgctaagaagcagaaaaac

SEQ ID NO: 207 - protein, 161 aa, Methanococcus maripaludis S2; identical to SEQ ID NO: 26

SEQ ID NO: 208 - DNA, 486 bp, Methanococcus maripaludis S2
atgaaaataactggtaaggtgcacttatttggggatgacatcgatactgatgcgataattcccggagcttatttaaaaacgactgatgaatatgagcttgcatcgcactgtatggcaggaattgacgaaaattttccagaaagggtcgaagatggtgactttttagttgcaggtgaaaattttggatgcggaagttcaagggaacaggccccaattgccataaaatactgcggaatcaaggcaataattgttgagagttttgcaaggatattttacagaaattgcataaatttaggagtatttccaattgaatgcaagggaatatcaaaacacgtcaaagatggggatgtaatagaattagatcttgaagaaaaaaaagttatcttaaaagacacggttcttgactgcaatcttccgacagggactgcaaaagatataatggatgaaggcgggcttataaattacgcaaagaaacaaaaaaattaa

SEQ ID NO: 209 - DNA, 999 bp, Methanobrevibacter smithii ATCC35061
  CDS (1)..(999)
atgtaccgcattgctatcattccgggcgacggtatcggtaaagaagtaatggaatccggtgaatatctgctggataaactggatctgaacttctctttcgaatacggtgaagcaggcttcgaatgctacaacaaaaacggcgttactctgccggaagaaaccatcaaaattgctaagaaatctgacgcaactctgttcggtgcttctacttctaccccaggtcagccgtccccgatcatcaacctgagaaaggaactggacgtttacgctaacctccgtccgatcaaatcttaccgtggtgttcgttctatctctgacaacatcgacttcctgatcgttcgtgaaaacactgaaggtctgtactctcagatcgaatacgagcaggacaacaaagttatcgctcagcgcgttatcactcgtcgtgcttctgagaagatcgctaaagttgcattcgaacagtgcatcgcgaagcagaagcagaaagttacttgcgtacacaaatctaacgttctgaagaaaactgacggcgtattcaaagagtctttctacaaaatcgctgaaaactacccgaacatcgaatccaacgacttctacgttgacgcaactgcgatgtacctgatcactcagccgcagaacttcgacgttatcgttacttctaacctgttcggtgacatcctgtctgacgaaggtgcgggtctggttggtggtctgggtctggcaccgtctggtaacatcggtgacgaccacggtctgttcgaaccggttcacggttctgcaccggatatcgctggtaaaggtatcgctaacccgtgctccatgatcctgactatcgcgatgatgctggactacctgaaagaatacgaaatctccaacaagatcaacaaagcggtagaaaacgttgtttctgctggtaaaactctgactccggacctgggtggtaactccaccacttctgaactgaccaagtctatcatcgacgaaatcctggaaggcgattac

SEQ ID NO: 210 - protein, 333 aa, Methanobrevibacter smithii ATCC35061
MYRIAIIPGDGIGKEVMESGEYLLDKLDLNFSFEYGEAGFECYNKNGVTLPEETIKIAKKSDATLFGASTSTPGQPSPIINLRKELDVYANLRPIKSYRGVRSISDNIDFLIVRENTEGLYSQIEYEQDNKVIAQRVITRRASEKIAKVAFEQCIAKQKQKVTCVHKSNVLKKTDGVFKESFYKIAENYPNIESNDFYVDATAMYLITQPQNFDVIVTSNLFGDILSDEGAGLVGGLGLAPSGNIGDDHGLFEPVHGSAPDIAGKGIANPCSMILTIAMMLDYLKEYEISNKINKAVENVVSAGKTLTPDLGGNSTTSELTKSIIDEILEGDY

SEQ ID NO: 211 - DNA, 1002 bp, Methanobrevibacter smithii ATCC35061
atgtacagaattgcaataatacccggagatggaattggaaaggaagtaatggaatctggcgaatatttactggacaaacttgatttgaatttcagttttgaatatggggaagcaggttttgaatgttataacaaaaatggagttacattacctgaagaaaccattaaaatagctaaaaaatcagatgcaacattatttggagccagtacaagtacccccggccagccaagtccaattataaatcttagaaaagaacttgatgtttatgcaaatttaaggccgataaaatcctatagaggcgtcagatcaataagtgataatattgactttttaatagttcgtgaaaatactgagggactttacagccagattgaatatgaacaggacaataaagtaattgcccaaagagtcattacaagaagagccagtgaaaaaatagccaaagttgcttttgaacaatgtatcgccaaacaaaaacaaaaggtaacctgtgtacataaaagcaatgtcctaaaaaaaaccgacggagtctttaaagaaagtttttacaaaatagctgaaaattaccccaatattgaaagcaatgatttttatgttgatgcaacagcaatgtatcttattacacaaccgcaaaactttgatgtaattgtaaccagcaacctgtttggagatatactgtctgatgaaggtgccggtcttgtagggggacttggacttgccccttcaggaaatattggagatgatcatggattatttgaacctgttcacggatctgcaccagatattgcaggtaaaggtatagctaacccatgctccatgattttaacaatagctatgatgctggattacttaaaagaatatgaaataagtaataaaataaataaagctgttgaaaatgttgtaagtgcaggcaaaacactgactcctgatttaggaggaaacagcactacatcagaacttaccaaatctatcatagatgaaatacttgaaggtgactactaa

SEQ ID NO: 212 - DNA, 1008 bp, Methanobrevibacter smithii ATCC35061
  CDS (1)..(1008)
atgtccacttctaacaagaaagacaacaaataccagatcgctgttattccgggtgacggtatcggtaaagaagtaatggaagcgactatctccgtactggatgaactggacgttgacttcgactacatctacggtatcgctggcgacgagtgcaacgaagagcacggtactccgctgccgcaggaaaccatcgacatcgttcgcgactctgacgcttgcctgttcggtgcagctggcgaaactgcagctgacgttatcgttaagatccgtcaggaaatgaagatgttcgctaatctgcgtccggtaaaatcttacccgaacaccaagtctctgttcgaaaacgttgacttcatgatcgttcgtgaaaacactgaaggtctgtacatcgctgaccaggaagaagaaactgaagatggcgcaatcgcgaagcgcgttatcactcgtgaagcagaagagcgtatcatcgactacgcattccagtacgctaaagacaacaaccgcactaaagttactgcagtacacaaagctaacgttctgaagaaaactgacggtctgttcaagaaaatcttctacgaagttggtgaaaaatacccggatatcgacactgaagatttctacgttgatgcaactgcgatgtacctggtaactcagccgcaggaattccaggttgttgttaccactaacctgttcggtgacatcctgtctgacgaaggtgctggtctggttggtggtctgggtctgattccgtctgctaacatcggtgctgacggtgcgctgttcgaaccggttcacggttctgcaccggatatcgctggtcagcagaaagcgaacccaatcgcgatgatgctgtctgcaatcatgatgctgcgttacctgggtgaaaacgacgcagctgacaaattcgacgctgctatcctgaaagttctgtctgaaggtaaaactctgactggcgacctgggtggttctgcaactaccatggaagttgctcaggcggttaaaaacgcgtta

SEQ ID NO: 213 - protein, 336 aa, Methanobrevibacter smithii ATCC35061; identical to SEQ ID NO: 41

SEQ ID NO: 214 - DNA, 1011 bp, Methanobrevibacter smithii ATCC35061
ttgagtacctcaaacaaaaaagacaataaatatcagatagctgttattccaggtgatggaataggtaaagaagttatggaagcaacaatctctgttttagacgaattagatgttgattttgattatatttatggtatagcaggtgacgaatgcaatgaagaacatggaacacctcttcctcaggaaactatcgatattgtaagggattctgatgcatgtttatttggagctgccggagaaactgcagcagatgttattgtaaaaatccgtcaggaaatgaaaatgtttgctaatttaagacctgtcaaatcttatcctaacaccaaatcattatttgaaaatgttgactttatgattgtaagggaaaatacagaaggattatacattgcagaccaggaagaagaaaccgaagatggtgcaatagctaaacgtgttattacaagagaagctgaagaacgtattattgattatgcttttcaatatgcaaaggacaacaacagaactaaagttactgcagttcacaaagctaatgttcttaaaaaaaccgacggattatttaaaaaaatattctacgaagtcggcgaaaaatatccggatattgatactgaagacttttacgttgatgcaacagcaatgtatcttgtaacacagcctcaggaattccaggttgttgtaactaccaatttatttggagatattttatctgatgaaggtgcaggacttgttggcggacttggtttaattccatcagcaaatattggagcagatggtgctttatttgaacctgttcatggttcagcaccggatattgcaggtcagcaaaaagcaaatccaatagctatgatgctctcagcaattatgatgcttagataccttggtgaaaatgatgctgctgacaaatttgatgctgctattttaaaagtattaagtgaaggtaaaaccttaactggtgatttaggcggcagtgcaactaccatggaagtagcacaagctgttaaaaatgcattataa

SEQ ID NO: 215 - DNA, 1011 bp, Methanococcus vannielii SB
  CDS (1)..(1011)
atgggttacatgccgaaaatctgcgttatcactggcgacggtatcggtaaagaagttgttccggaaactctgcgcgtactgaacgaagttcacgacttcgaatacatcgaagcacacgcgggttacgagtgcttcaagcgctgcggtgaatccatcccggaatccactattcagactgcgaaaaactctgactccatcctgttcggttctgttaccactccgaaaccaactgaactgaaaaacaagccgtaccgctctccgattctgactctgcgtcaggaactggatctgtacgctaacatccgtccgacttacaacttcaaagacctggacttcgttatcatccgtgaaaacactgaatgcctgtacgttaagcgtgaatactacgacgaaatcaacgaagttgctatcgctgaacgtatcatctccaagaaaggttctgaacgtatcatcaaattcgctttcgaatacgcacgtctgaacaaccgtaagaaagtttcctgcatccacaaagctaacgtactgcgcgtaactgacggtctgttcctggaaatcttcgagaagatcgcgaaactgtacgaaaacttcggtatctcttctaacgactacctgatcgacgcaactgcaatgtacctgatcaaaaacccgtacatgttcgacgtaatggttaccactaacctgttcggtgacatcctgtctgacgaagctgctggtctgatcggtggtctgggtatgtctccgtctgctaacatcggtgacaacctgggtctgttcgaaccggttcacggttctgcaccggatatcgctggtaaaggtatctccaacccgatcgcgactatcctgtctgcgtctatgatgctggatcacctgaaaatgaacaagaaagcagaaatcatccgtaacgctgttaagaaaactatcaacaacggttacctgactccggacctgggtggttctctgaaaacttctgaagttgttaacaaagttatcgaattcatccgcgacgagatt

SEQ ID NO: 216 - protein, 337 aa, Methanococcus vannielii SB; identical to SEQ ID NO: 42

SEQ ID NO: 217 - DNA, 1014 bp, Methanococcus vannielii SB
atgggctatatgccaaaaatctgtgtcataactggtgatggaattggaaaagaagtcgtgcctgaaacattaagagttttaaacgaagttcacgactttgaatatattgaagcccatgctgggtacgagtgttttaagagatgcggagaatcaatacctgaaagcacgattcaaacagctaaaaattctgattcaattctttttggttcagtaactactccaaaaccaactgaattaaaaaataagccatatcgtagtccaatacttacgttaaggcaggaattagacctttatgcaaacatacggcccacttataattttaaagacttggattttgtcataatacgggaaaatactgagtgtctttacgtaaaaagggagtattatgacgaaataaacgaagtagcaattgccgaaagaataatttcaaaaaagggaagcgaaagaataataaaatttgcatttgaatatgcaaggttaaataatcgaaaaaaagtgtcttgcatacacaaagcgaatgtattaagagtaactgacggattatttttggaaattttcgaaaaaatagctaaactttatgaaaactttggtatatcgagcaatgattacttaatagatgcaacagcaatgtaccttattaaaaatccatatatgtttgatgtaatggttacaacaaacctttttggagatattttatctgatgaggccgcaggacttattgggggtcttggaatgtcgccttctgcaaatattggggataatttaggattatttgagcctgttcatggttcagccccagatattgctggaaaaggaatatctaatccgattgcgacaattttaagtgcttcaatgatgcttgaccatttaaaaatgaataaaaaggcggaaattataagaaatgcagttaaaaaaacgataaataatggttatttgacacccgatcttggtggaagcctgaaaacttccgaagttgtaaataaagttatagaatttattcgggatgaaatctaa

SEQ ID NO: 218 - DNA, 1029 bp, Methanococcus aeolicus Nankai 3
  CDS (1)..(1029)
atgaagatcccgaaaatctgcgttatcgaaggtgacggtatcggtaaagaagttatcccagaaaccgttcgcattctgaaagaaatcggtgacttcgaattcatctacgaacacgctggttacgaatgcttcaagcgctgcggtgacgctatcccggagaaaactctgaaaactgcgaaagagtgcgacgctatcctgttcggtgcggtatctactccgaaactggacgaaactgaacgtaagccgtacaaatctccgattctgactctgcgtaaagaactggatctgtacgctaacgttcgtccgatccacaaactggataactctgactcctccaacaacatcgacttcatcatcatccgtgaaaacactgaaggtctgtactccggtgttgaatactacgacgaagaaaaagaactggcaatctctgaacgtcacatctccaagaaaggttccaagcgcatcatcaaattcgcattcgaatacgctgttaagcaccaccgtaagaaagtttcctgcatccacaagtctaacatcctgcgtatcactgacggtctgttcctgaacatcttcaacgaattcaaagaaaaatacaaaaacgaatacaacatcgaaggtaacgactacctggttgacgcaactgcgatgtacatcctgaaatctccgcagatgttcgacgttatcgttactaccaacctgttcggtgacattctgtctgacgaagcgtctggtctgctgggtggtctgggtctggcgccgtctgctaacatcggtgacaactacggtctgttcgaaccggttcacggttctgcaccggatatcgctggtaaaggcgttgctaacccgatcgctgcagtactgtctgcttctatgatgctgtactacctggatatgaaagagaagtctcgcctgctgaaagacgctgttaaacaggtactggcacacaaagacatcactccggacctgggtggtaacctgaaaaccaaagaagtttctgacaagatcatcgaagaactgcgtaagatctcg

SEQ ID NO: 219 - protein, 343 aa, Methanococcus aeolicus Nankai 3; identical to SEQ ID NO: 43

SEQ ID NO: 220 - DNA, 1032 bp, Methanococcus aeolicus Nankai 3
ttgaaaatacctaaaatatgtgtgatagaaggggacggcataggaaaagaagtaatacctgaaacagtccgcatattaaaagaaataggggactttgaattcatatatgaacatgcgggatatgaatgttttaaacggtgcggtgatgcaatacccgaaaaaacattaaaaactgcaaaagaatgcgatgccatattatttggtgcagttagcacccctaaattagatgaaacggagcgaaaaccatataaaagccccatattaacacttagaaaagaattagacctatatgcaaatgtaagaccaatacataaattagataattccgatagttcaaataatatagatttcataataattcgagaaaacacagaaggactatattctggtgtggaatattatgacgaagaaaaagagttggcaatatcggaaaggcatatatctaaaaaaggaagcaaaagaattattaaatttgcatttgaatatgctgtgaaacatcacagaaaaaaagtatcctgtatccataaatcaaatattttaagaattacggacggtctttttttaaacatattcaatgaatttaaagaaaaatataaaaatgaatacaatatagaaggaaacgattatttagtagatgctacggcaatgtatattttaaaaagcccacaaatgttcgatgtaattgtaactacaaatttatttggtgacatattatccgatgaagcatcgggattattgggaggtttaggcttggctccttcagcaaatattggggataattatggattatttgagcctgtgcatggttccgccccagacatagctggaaaaggtgttgcaaatccgatagctgcggttcttagtgcttcgatgatgctatattacctagatatgaaggagaaaagtaggctattaaaagatgccgtaaaacaggtgttggcccataaagatataactcctgatttagggggcaatttaaaaacaaaggaagtaagcgataaaattattgaagaattacggaaaatatcctaa

SEQ ID NO: 221 - DNA, 1017 bp, Methanococcus maripaludis S2
  CDS (1)..(1017)
atgcgtaacactccgaaaatctgcgttatcaacggtgacggtatcggtaacgaagttgttccggaaaccgttcgcgtactgaacgaactgggtgacttcgaattcatccacgcgcacgctggttacgaatgcttcaagcgctgcggtgacgctatcccggaaaacaccatcgaaatcgctaaagagtctgactgcatcctgttcggttctgtaactactccgaaaccaactgaactgaaaaacaagtcttaccgctctccgattctgactctgcgtaaagagctggatctgtacgctaacatccgtccgacttacaacttcgacaacctggatttcgttatcatccgtgaaaacactgaaggtctgtacgttaagaaagaatactacgacgagaaaaacgaagttgctatcgctgaacgtatcatctccaagttcggttcttctcgcatcgttaaattcgcattcgactacgcagtacagaacaaccgtaagaaagtttcctgcatccacaaagcgaacgttctgcgcgtaactgacggtctgttcctggaagttttcgaagaaatgtccaagcactacgaaaaactgggtatcaaatctgacgactacctgatcgacgcaactgcgatgtacctgatccgtaacccgcagatgttcgacgttctggttactaccaacctgttcggtgacatcctgtctgacgaagcagctggtctgattggtggtctgggtatgtctccgtctgctaacatcggtgacaaaaacggtctgttcgaaccggttcacggttctgcaccggatatcgctggtaaaggtatctccaacccgatcgcgactatcctgtctgctgcaatgatgctggatcacctgaaaatgaacaaagaagctgaatacatccgtaaagcggttaagaaaaccgttgaatgcaaatacctgactccggacctgggtggtaacctgaaaactttcgaagttactgaaaagatcatcgaatccatccgttctcagatgattcaa

SEQ ID NO: 222 - protein, 339 aa, Methanococcus maripaludis S2; identical to SEQ ID NO: 36

SEQ ID NO: 223 - DNA, 1020 bp, Methanococcus maripaludis S2
atgagaaacactcccaaaatttgtgttatcaatggtgacggtattggaaacgaagtagttcctgaaacggtgcgagttttaaatgaacttggtgacttcgaattcattcatgcccatgcaggttacgaatgttttaaaagatgtggcgatgcgataccagaaaacacaattgaaattgcaaaagaatctgattgtattttatttggatcagttaccactccaaaaccgactgaattaaaaaataaatcatatagaagtccaatattaactttaagaaaagaacttgacctttatgcaaatattaggccaacttataactttgataatcttgattttgttataattcgagaaaatactgaaggactctatgtaaaaaaagaatattacgacgaaaaaaacgaagttgcaattgctgagcgaataatttcaaaatttggaagttctagaattgtaaaatttgcttttgattatgcggttcaaaataacagaaaaaaagtatcctgcatacataaagcaaacgtattacgggttactgacggattatttttagaagttttcgaagaaatgtctaaacattacgaaaaattaggaataaagtctgatgactacctaattgacgcgacagcaatgtatttgattagaaacccgcaaatgtttgatgtattggttacaacaaatctttttggagatattttatctgatgaagctgcaggacttattggcggacttggaatgtctccttcagcaaacattggtgataaaaacggattatttgagccagttcatggatctgcaccagacattgctggaaaaggaatttcaaacccgattgcaacaatattgagtgctgcaatgatgcttgaccatttaaaaatgaataaagaagccgaatacattagaaaagcggttaaaaaaacggttgaatgtaaatatttaactcctgatcttgggggaaacttaaaaacttttgaagttacggaaaaaatcattgaatccataaggtctcagatgattcagtga

SEQ ID NO: 224 - DNA, 498 bp, Methanosarcina acetivorans C2A
  CDS (1)..(498)
atgatgaaaaacccgatcatcggtcgcgtatggaaattcggtgacgacatcgacactgacgttatcatcccaggtaaatatctgcgtactaaagacatgcagatcttcgctgcacacgcgatggaaggtattgctccggaattcaccaagaaagcgaagccgggcgacatcatcgttgctggcgaaaacttcggttgcggttcttcccgtgagcaggcaccgctggcaatcaagcacgctggtatcgcttgcgttgttgctaaatctttcgcacgtatcttcttccgtaacgcaatcaacgttggtctgccgctgatggaagctgacatcgaatgccaggaaggtgacgaaatcgaagttgatctgctgaaaggtgaagttcgcgttccgggtaaaggcgtattcgttggtaacaagctgccggacttcctgctggatatcctgactgacggtggtctggtttctcaccgtaagaaagcgcagaacgaacagaaagaa

SEQ ID NO: 225 - protein, 166 aa, Methanosarcina acetivorans C2A
MMKNPIIGRVWKFGDDIDTDVIIPGKYLRTKDMQIFAAHAMEGIAPEFTKKAKPGDIIVAGENFGCGSSREQAPLAIKHAGIACVVAKSFARIFFRNAINVGLPLMEADIECQEGDEIEVDLLKGEVRVPGKGVFVGNKLPDFLLDILTDGGLVSHRKKAQNEQKE

SEQ ID NO: 226 - DNA, 501 bp, Methanosarcina acetivorans C2A
gtgatgaaaaaccccatcataggccgagtctggaaattcggagacgacatagacactgatgtgattatcccgggaaaatacctgcggacaaaggatatgcagatttttgcagctcatgcgatggaaggtattgctcctgagtttacgaaaaaggcaaagcccggagatattattgttgcaggagagaatttcgggtgcggttcctcaagggaacaggctcctcttgctataaaacatgcgggaatagcctgcgttgtggcaaagtcctttgcaagaatctttttcagaaatgcgattaacgtggggctgcccctgatggaggctgatattgagtgtcaggagggggacgagatagaagtcgacctgctcaaaggggaggtcagggttcccggaaaaggggtgtttgttggaaacaaactgcctgacttcctgctcgatatactcacagacggcggacttgtttcccatagaaaaaaagcgcaaaacgagcagaaagaataa

SEQ ID NO: 227 - DNA, 486 bp, Methanospirillum hungatei JF-1
  CDS (1)..(486)
atgactgcgctgaaaggttctggtccggctgtttgcatcggtgaagatatcgacactgacctggttatcgctggtcgttatctgcgtactaaagactggtctttctgggcacagcacgtattcgaagatctggacccgtccctggcagaacgtctgaaaggcgcagtactggttgctggtaagaacatgggctgcggttcttctcgcgaacaggctgcacgtgcgctgcacgaagctggcgttctggcggttatcgctccgtctttcgctcgtatcttcttccgtaactgcatcaacgttggtctgccgctgctggaatgcgacctgactggctgcactgacggtatgatcatcactttcgactgcactgaaggctgggttgaagttgacggtactcgctacctgttccgtccgctgtctccgcgtatgcaggaaatcctgtctaccggtggtctgattgaatactggaagcgccgtaaagagcgc

SEQ ID NO: 228 - protein, 162 aa, Methanospirillum hungatei JF-1
MTALKGSGPAVCIGEDIDTDLVIAGRYLRTKDWSFWAQHVFEDLDPSLAERLKGAVLVAGKNMGCGSSREQAARALHEAGVLAVIAPSFARIFFRNCINVGLPLLECDLTGCTDGMIITFDCTEGWVEVDGTRYLFRPLSPRMQEILSTGGLIEYWKRRKER

SEQ ID NO: 229 - DNA, 489 bp, Methanospirillum hungatei JF-1
atgactgctctcaaaggctccggccctgcagtctgtatcggagaggatatcgatacggatctggtgattgccggacgatacctgagaacaaaagactggagtttttgggcacagcatgtgtttgaggatcttgatccttctcttgccgaaagactgaaaggagcagtgcttgtcgccggaaagaacatgggttgcgggtcttcacgggaacaggcggcccgggctctgcatgaggcaggagttcttgctgtcatcgccccttcgtttgccagaatttttttccggaactgcatcaatgtcgggcttccgttactggaatgtgatctgaccggatgcaccgatggcatgatcatcacttttgattgcactgaagggtgggtggaggtggatgggacgcggtatctcttccggcccctctctccacggatgcaggagattctcagcaccggcggtctgattgagtactggaaacggagaaaagagcgatga

SEQ ID NO: 230 - DNA, 489 bp, Methanosphaera stadtmanae DSM 3091
  CDS (1)..(489)
atggactccatgaaaggtaaagtatggactttccgcgactgcatcgacactgacgttatcattgctggtcgttatctgcgtactttcaacccggaagatctggcggcacacgtaatggaagcagaagatccggaattctcttccaaagttggtaaaggcgacatcatcgttggcggctggaacttcggttgcggttcttcccgtgagcaggcaccggttgctatcaaaactgctggcgtatctgcggttatcgcgaagtctttcgctcgcattttctaccgtaacgctatcaacatcggtctgccggttatcactgcagacatcgaagttgacgaaggtgacatcctggaagttaacatcgaagatggtatcatcatcaacgaaactaccaagaaaactttcaaaatcaagccgttcgacgctgaaatgctggacatcctggaaaacggtggtctggttaaccagtacctgaaaaacaagaaagaagtt

SEQ ID NO: 231 - protein, 163 aa, Methanosphaera stadtmanae DSM 3091; identical to SEQ ID NO: 29

SEQ ID NO: 232 - DNA, 492 bp, Methanosphaera stadtmanae DSM 3091
atggatagtatgaaaggaaaagtatggacatttagagattgtatagatactgatgtaattattgctggaagatatttaagaacatttaatccagaagatttagcagcacatgtaatggaagctgaagatccagaattttcaagtaaagttggaaagggagatataattgttggtggatggaattttggttgtggatcttcaagggaacaggcaccagttgcaataaagacagcaggagtatcagcagtaatagctaaatcatttgccagaattttttatagaaatgctattaatattggcttacctgttataacagcagatattgaagtggatgaaggggatattttagaagtaaatattgaagatggaattattataaatgaaacaactaaaaaaacatttaaaattaagccatttgatgctgaaatgttggatattttagaaaatggtggtcttgttaatcaatatttaaaaaataagaaggaggtatag

SEQ ID NO: 233 - DNA, 483 bp, Methanosaeta thermophila PT
  CDS (1)..(483)
atgatccgcggtcgtgcatgggtattcggtgacgacgttgacactgacgttatcatcccaggtaaatatctgcgtactaaagatctgcgtgaactggcagaacacgtaatggaaggtctggatccgtctttctcttccaaagttcagccgggcgacgttatcgttgctggtaaaaacttcggttgcggttcttcccgtgagcaggcaccgctggcgctgaaactggcgggtatctcctgcatcgttgcgcgttctttcgctcgcattttctaccgtaacgctatcaacatcggtctgccgctgatcgaagctgacgtaatgtgcgaaccgggtgaagttgttgaagttgacctgtctcgcggtcgcgttatcgctggcggtcgtgaatacaccggtcgtaagctgccggacttcctgatggaaatcctgaacgacggtggtctggttgctcaccgccgtaagcagcgtgaacgtggtctgatc

SEQ ID NO: 234 - protein, 161 aa, Methanosaeta thermophila PT
MIRGRAWVFGDDVDTDVIIPGKYLRTKDLRELAEHVMEGLDPSFSSKVQPGDVIVAGKNFGCGSSREQAPLALKLAGISCIVARSFARIFYRNAINIGLPLIEADVMCEPGEVVEVDLSRGRVIAGGREYTGRKLPDFLMEILNDGGLVAHRRKQRERGLI

SEQ ID NO: 235 - DNA, 486 bp, Methanosaeta thermophila PT
atgatcaggggcagggcatgggtctttggggatgatgttgatacagatgtaataattccagggaaatacctcaggacaaaggatctgcgcgagctggcggagcacgtcatggagggtctggatccgtcgttctcatcaaaggtccagccaggggatgttatagtagcaggcaagaacttcgggtgcggctcttccagggagcaggccccgcttgccctgaagctcgcaggaatatcatgcatcgtcgcccgatccttcgccaggatattttacaggaacgccataaacatcggtctccctctcattgaggcagatgtcatgtgcgagccgggggaggtcgtggaggtagatctctcccgggggagggtcatcgcaggcggaagggaatataccggcagaaaacttccggacttcctgatggagatcctgaacgatggagggctcgtggcccacagaagaaagcaaagggagcgcggtctgatttga

SEQ ID NO: 236 - DNA, 1272 bp, Methanosarcina acetivorans C2A
  CDS (1)..(1272)
atgctgttcgactaccgtaaaggtggtctgttcctgggtactatctctgagaagatcttctctcgcgctgctggtactgaagcgaaagctaacgacttcgttctggctgacgttgactacgcaatggcgcacgacggtacttctgtactggcggttaacgcattcaaagaaatggaaatggaaaaagtatgggacccgtcccgcatcgttgttccgttcgaccacatcgcgccggcaaacaacgaaacttctgcaactctgcagcgtgaaatccgtgaatgggttaaagagcagggtatcccgaacttctacgaagttggtgaaggtatctgccaccaggttctgccggaaaacggcttcgcgctgccaggtaagctggttgttggtgctgactctcactcctgcacctacggtgcgttcggtgcgttcgcaactggcgttggtgcaactgacatggctgaaatcttcgcaactggtaagctgtggttcaaagttccggaatccttccgtatgaccgttgaaggttctctgcgtaaaggcgtttacgctaaagacctgactctgtacctgattggtaagactggtattgctggcgcaacttacaaagcggttgaattctacggtcaggctatccgtgaactgaccgttgctggtcgtatgactctgtgcaacatggctatcgaaatgggtgcgaaaaccggtatcgttccgccggacgaaaagactttcgaattcctgaaaaaccgcgctgctgcaacttacgaaccggtttacgctgacccggatgctgtttacctggaagagttcacttacgacgctgatgacatcgaaccacaggttgcttgcccgcaccaggttgacaacgttaagccggttggtgaagttgaaggtactcacgttgaccaggtattcatcggtacttgcaccaacggtcgtctggaagatctggaagttgctgctgcggtactgaaaggtaaacaggttgctgttcgtactatcgttatcccggcatctcgcactactctgctggcagctatcgaaaacggcaccatggaaactctgctgaaagctggcgtaactctggcaactccgggttgcggtccgtgcctgggtgcacaccagggcgtactgggtgaaggtgaagtttgcgtatctactgctaaccgtaacttcaaaggtcgtatgggtaaaggcggcttcatctacctggcttctccggcaactgcggcagcttctgcgctgactggcgaaatcactgatccgcgcactgtc

SEQ ID NO: 237 - protein, 424 aa, Methanosarcina acetivorans C2A
MLFDYRKGGLFLGTISEKIFSRAAGTEAKANDFVLADVDYAMAHDGTSVLAVNAFKEMEMEKVWDPSRIVVPFDHIAPANNETSATLQREIREWVKEQGIPNFYEVGEGICHQVLPENGFALPGKLVVGADSHSCTYGAFGAFATGVGATDMAEIFATGKLWFKVPESFRMTVEGSLRKGVYAKDLTLYLIGKTGIAGATYKAVEFYGQAIRELTVAGRMTLCNMAIEMGAKTGIVPPDEKTFEFLKNRAAATYEPVYADPDAVYLEEFTYDADDIEPQVACPHQVDNVKPVGEVEGTHVDQVFIGTCTNGRLEDLEVAAAVLKGKQVAVRTIVIPASRTTLLAAIENGTMETLLKAGVTLATPGCGPCLGAHQGVLGEGEVCVSTANRNFKGRMGKGGFIYLASPATAAASALTGEITDPRTV

SEQ ID NO: 238 - DNA, 1275 bp, Methanosarcina acetivorans C2A
ttgttatttgattatcggaaaggaggcttatttctgggaacaatcagcgagaaaatcttttcccgggcagcgggaacagaggcaaaagctaacgattttgtgctggcagatgtggactatgcaatggcgcatgacggcacatcggtacttgccgtgaatgcttttaaggaaatggagatggaaaaggtctgggacccttcaaggatcgtagtcccctttgaccacatcgcgcctgcgaataatgagacctcagccaccctgcagagagagatcagggaatgggtaaaggagcaggggatccctaacttctatgaggtcggggaagggatctgtcaccaggtccttccggaaaacggttttgcattgcccggaaagctggttgttggggctgattcgcattcctgcacgtacggggcttttggagcttttgcaacaggggtaggggctaccgatatggctgaaatctttgctacgggaaaactctggtttaaggttccggaaagcttcaggatgacggttgaagggagccttcggaaaggggtctatgcaaaggatctgactctttacctgatcggaaagaccggaattgccggggcgacctataaagcagttgagttttacgggcaggcaatccgcgaacttacggttgctggcaggatgacgctctgcaatatggcaattgagatgggcgcaaagaccgggatcgtccctccggacgaaaagaccttcgagttcctgaaaaacagggcagcagctacttatgaacctgtctatgccgacccggatgctgtttatctggaagagttcacttatgatgccgacgatatcgaaccccaggttgcctgcccgcatcaggtggataatgtaaagcccgtaggagaggttgaaggcactcatgtagaccaggtctttatcgggacgtgcacgaacggcaggcttgaagacctcgaggtcgcagcagcagtcctgaaaggaaaacaggttgcagtcaggacaattgtgatccctgcctctcgcaccaccctccttgcagcaatcgaaaacgggacaatggaaactctgctgaaagccggggtaacccttgcaaccccgggctgcggaccctgcctcggtgcccatcagggggtgctcggagaaggcgaggtctgcgtttcaaccgcaaacaggaacttcaaaggcaggatgggaaaaggcggttttatttatcttgcatctccagcaactgcagcagcctcggccctgacaggagaaatcaccgatccgaggacagtttga

SEQ ID NO: 239 - DNA, 1212 bp, Methanospirillum hungatei JF-1
  CDS (1)..(1212)
atggttactctgtctgagaagatcctgggtgcaccggcaggcacttacatcgaccgtcacatcgaccgcgcattctgccacgacggtactggtattcaggcgaagatcatctacgacgcgatgggcgcaccgggtatcgctaacccggactccgtttacatcatctacgaccacattgctccggctaacaactctcagactgcagaactgcaggctgaactgcgtactctggcgcgtgaatgcggtgttcacttctgggatatcggttctggtatctgccaccaggtaatggctgaaggtcaggttgctccgggtgaagttgttatcggtgctgactctcactcctgcactctgggtgcgctgggtgcattcgctaccggtgttggtgcatctgacatggctggtatctgggtttctggtgaaacctggctgcgcgttccggactccatcggtatccacctgtctggttctctgaagcagggcgttgagtggaaagacgttgcgctgacttacgttgctcgcctgggtatggacggtgcaacttacgctgcgctggaattcatcggtgaatccactccgtctgtaccgatggaaggtcgtctgactctgtgcaacatggctgttgaagcaggcgcgaaaaccggtctgttctacgctgacaaagaaactgaacgttacctggctgaatactccgtaccatgcccgatgcaagttctggaaaacccagactacgttcaggactgctacctggatctggctgacatcgaaccggtttgcgcagtaccgcaccgcgttgacaccgtacagccggttccggcactggcgggtactcacctggatcaggttttcatcggtacttgcaccaacggtcgtttcgaagatctggctcgcgctgcgcgtatcctgaaaggtcgtcgcgttaaagttcgtactatcgttgttccggcatctgaacgtgacttcctgaaagcaatcctgtctggtgttgctgctgacctggtacaggctggctgcaccatcggtccgccgggttgcggtccgtgcctgggtgcgcacatgggcgttctgggtgaaggtgaagttgcgctgtctactgcaaaccgtaacttcaaaaaccgtatgggcgtaggtgcttcttactacctgtgctctccgtctactgctgctgcatctgctatctacggtgaaatcactgacccgcgtgaagtcgtt

SEQ ID NO: 240 - protein, 404 aa, Methanospirillum hungatei JF-1
MVTLSEKILGAPAGTYIDRHIDRAFCHDGTGIQAKIIYDAMGAPGIANPDSVYIIYDHIAPANNSQTAELQAELRTLARECGVHFWDIGSGICHQVMAEGQVAPGEVVIGADSHSCTLGALGAFATGVGASDMAGIWVSGETWLRVPDSIGIHLSGSLKQGVEWKDVALTYVARLGMDGATYAALEFIGESTPSVPMEGRLTLCNMAVEAGAKTGLFYADKETERYLAEYSVPCPMQVLENPDYVQDCYLDLADIEPVCAVPHRVDTVQPVPALAGTHLDQVFIGTCTNGRFEDLARAARILKGRRVKVRTIVVPASERDFLKAILSGVAADLVQAGCTIGPPGCGPCLGAHMGVLGEGEVALSTANRNFKNRMGVGASYYLCSPSTAAASAIYGEITDPREVV

SEQ ID NO: 241 - DNA, 1215 bp, Methanospirillum hungatei JF-1
atggtgacattatcggagaagattctaggtgccccggccggcacgtatattgatcgacatattgaccgggcattctgccatgacgggaccgggattcaggcaaagataatctatgatgcaatgggggctccgggtattgcaaatccggattctgtctacattatttatgatcatattgctccggcgaacaactcccagactgcagaactccaggcagagctccggacccttgccagagagtgcggggtgcatttctgggatatcggctctggtatatgtcatcaggtgatggcagaagggcaggtggcaccaggggaggttgtcatcggagctgattctcattcatgcacactcggtgctctcggggcgtttgcaaccggcgtcggggcaagtgacatggcaggtatctgggtgtctggtgagacctggctgagggttcctgattcaatcggcattcatctctccggatccttaaagcaaggcgttgagtggaaggatgttgcgctgacctatgtggcacggctcgggatggacggagcaacctatgcagccctggagttcattggtgaatccactccgtcggttcccatggaaggacgactgacattatgcaatatggcggttgaggccggggcaaagaccgggctcttttatgcagacaaggagacagagcgatatctcgcagagtattctgttccctgtccgatgcaggttttggaaaacccggactatgtgcaggactgctatcttgatctcgcagatattgagccggtatgtgcggttcctcaccgggtggatactgtccaaccggttccggcccttgcaggtacccatcttgatcaggtctttatcgggacctgtacgaacggccggtttgaagatctcgcacgtgctgccaggattctgaaaggacgccgggtaaaagtcagaaccattgttgttccggcatcagagcgtgatttcctcaaggctattttgtcaggggttgctgctgacctcgtgcaggcaggatgtaccatcggaccgcccggctgtggtccctgccttggtgcccatatgggtgttctgggtgagggtgaagtagccctttcaaccgcaaaccggaactttaagaaccggatgggtgtgggggcttcgtattatctctgttcaccctccactgctgcagcaagtgccatatatggtgagattactgatccaagggaggttgtatga

SEQ ID NO: 242 - DNA, 1245 bp, Methanosphaera stadtmanae DSM 3091
  CDS (1)..(1245)
atgaacatctctgaaaagattctggcgaaagcgtctaacaaagaagaagtttctccgggcgacaccatcactgctaacatcgacgttgcaatgtctcacgacggtacttctccgccaaccatcaaagtattcgagaagatcgctgacaaagtatgggatccggaaaagatcgttctggtattcgaccacgttatcccggctaacaccatcggttctgctgaattccaacaggttgttcgtgaattcggtaagaaacagaaaatcccgaacatgtacattcagggcgaaggtgtttgccacgaagttctgccggactacggtcacgttaagccgtctaccgttatcgttggtgctgactctcacacctgtacttacggcgcattcggtgcgttctctaccggtctgggtgcaactgacctggcaatggtttacgcaactggtcagacctggttcaacgtaccggaatctctgaaaatcaacgttaacggtactctgaacgaaaacgtttactccaaagacgttatcctgaaaatcatcaaagaactgggtgcatacggtgcaacttacaaatctctggaattccacggtgacaccatcgacaacatgtccgttgcttctcgcctgaccatgactaacatggctatcgaatgcggtgcgaaaaacggtatcatggttccgaacaagcagactaaagaatacctgtctcagcgtggtatcactgactacaccatcaccactgcgtctaaagacgctgaatacgagaagatctacgacttcgacgttgacgatctgcagccgcagatcgcttgcccgcacaacgttgacaacgttgaagatatcgacaaagttgctggtactcacatcgaccaggcggtactgggttcctgcaccaacggtcgttacgaagatctgctgcaggctgcagaagttatcgaaggtcacaaaatccacgaagatgttgaactgctggtattcccggcatctcgccacgtttacgaaaaagctatcgaaaccggtgttatccagactctgctgaaatctaacgcgattatctgcaacccaggttgcggtccgtgcctgggtgcacacatgggcgtaatgactgacgacatgacttgcatctccaccactaaccgtaacttcctgggtcgtatgggttctgcgaagtcttacgtttacctgtctaacccggctgttgttgctgcttctgctatcaaaggtgaaatcactaacccgtctgagatc

SEQ ID NO: 243 - protein, 415 aa, Methanosphaera stadtmanae DSM 3091; identical to SEQ ID NO: 19

SEQ ID NO: 244 - DNA, 1248 bp, Methanosphaera stadtmanae DSM 3091
atgaatataagtgaaaaaatacttgcaaaagcatcaaataaggaagaagtaagtcctggagatacaattactgcaaatatagatgttgcaatgagtcatgatggaacaagtcctcctacaataaaagtatttgaaaaaatagctgataaagtatgggatccagaaaaaatagttcttgtattcgatcatgtgattcctgcaaacacaatcggatctgctgaatttcaacaggtagtaagagaatttggtaaaaaacaaaagattccaaacatgtatattcaaggagaaggagtttgtcatgaagtacttccagactatggtcatgtaaaaccttcaacagtaatagttggagcagattcacatacatgtacatatggtgcttttggtgcattctcaacaggacttggagctacagatcttgcaatggtatatgcaactggacaaacatggtttaatgttccagaatccttaaaaataaatgttaatggtacattaaatgaaaatgtatactctaaagatgtaattctaaaaataattaaggaattaggtgcctatggtgctacttataaaagtcttgaattccatggtgatacaattgataatatgtctgtagctagtagattaacaatgacaaatatggcaattgaatgtggagctaaaaatggtataatggtacctaataaacagacaaaggaatatctctcacaaagaggaataactgattatactattactactgctagtaaagatgcagaatatgagaaaatttatgactttgatgttgatgatcttcaaccacaaattgcatgtccacataatgtagataatgttgaagatatagataaagtagcaggtactcatatagatcaagcagtacttggttcatgtaccaatggacgttatgaagatttacttcaagcagctgaagttattgaaggacataaaatacatgaagatgttgaattactagtattcccagcatcaagacatgtgtatgaaaaagcaatagaaacaggtgttattcaaacattacttaaatcaaatgcaattatatgtaatcctggatgtggaccatgtcttggagcacatatgggtgtaatgacagacgatatgacttgtatttccactactaatagaaatttccttggtagaatgggtagtgctaagtcatatgtatatctatcaaatccagcagttgttgcagcttcagcaataaaaggtgaaattacaaatccaagtgagatataa

SEQ ID NO: 245 - DNA, 1140 bp, Methanosaeta thermophila PT
  CDS (1)..(1140)
atgtctcacgacggtacttctgtactggcaatcaaagcgttccgtgaaatgggttctgaaaaagtatgggacaagtctcgcatcgttatcccgttcgaccacatcgttccggctaacaacgaaactgctgcaactctgcaggctgaagttcgtcgctgggcgcgtgctcagggtatcgaaaacttctacgactgcggtcacggtatctgccaccaggtattctgcgaaatgggcttcgcactgccgggtgcgctggttgttggtgctgattctcactcctgcacctacggtgcgctgggtgcattcggtactggcgttggtgcaactgacatggctgaaatctactctcgcggtcgtctgtggttccgcgtaccggaaaccatctgcatgcgtctggaaggtactctgggtgacatggtttctgcgaaagacctggcgctgttcgttgttaaagagatgggtgctgacggtgctaactacatgtccgttgagttcgttggtggtgctgttgaacgtctgtctatctccggtcgtatgactctgtgcaacatgggcgttgaaatgggtgcgaaagctgctatcgttccgccggacgaatccgttgacgcttacctggcacgtcgtgctcgccgtccgtacactcacattcactctgatccgggttcttactaccgtgaaatcgaatacgacgtttctgacattccgccgatgatcgctgcaccgtaccgcgttgacaacgttcacccggtacgtgacctggctggtatcgaagttgatcaggtattcatcggtacttgcaccaacggtcgtctggaagatctggaaatggctgctcgcatcgttaaaggtaagcgcgttaagatccgtactctggttatcccggcatctcgcgaaatctacctgggtgcgctgcgttctggtgttatcgaaactctggttgaagcgggtgcgatgatcggtccgccgggttgcggtccgtgcctgggtgcacacatgggcgtactgggtgacggtgaagtttgcctgtctacttctaaccgtaacttcccaggtcgtatgggtcgtaacggtaaagtttacctggcttctccggcaactgctgcagcaactgctatcaccggtaaaatcactgaccctcgg

SEQ ID NO: 246 - protein, 380 aa, Methanosaeta thermophila PT
MSHDGTSVLAIKAFREMGSEKVWDKSRIVIPFDHIVPANNETAATLQAEVRRWARAQGIENFYDCGHGICHQVFCEMGFALPGALVVGADSHSCTYGALGAFGTGVGATDMAEIYSRGRLWFRVPETICMRLEGTLGDMVSAKDLALFVVKEMGADGANYMSVEFVGGAVERLSISGRMTLCNMGVEMGAKAAIVPPDESVDAYLARRARRPYTHIHSDPGSYYREIEYDVSDIPPMIAAPYRVDNVHPVRDLAGIEVDQVFIGTCTNGRLEDLEMAARIVKGKRVKIRTLVIPASREIYLGALRSGVIETLVEAGAMIGPPGCGPCLGAHMGVLGDGEVCLSTSNRNFPGRMGRNGKVYLASPATAAATAITGKITDPR

SEQ ID NO: 247 - DNA, 1149 bp, Methanosaeta thermophila PT
atgtcgcacgacggcacaagcgtccttgccataaaggcattcagggagatggggtcagagaaggtctgggataaaagcaggatagtaataccgttcgatcacatcgtgcccgcaaacaatgagaccgctgcgacgcttcaggcggaggtgagaagatgggcgagggctcaggggattgagaacttctacgactgcggtcatggcatatgccaccaggtcttctgcgagatgggtttcgctcttcctggggcgcttgtcgtgggcgccgactctcattcctgtacttatggtgcactcggcgcattcggaacaggtgtgggcgccacggacatggctgagatctattcccgcgggaggctatggttcagagtgccggagacgatatgcatgcgccttgagggcactctgggtgatatggtatcagcaaaggatctcgccctcttcgtggtgaaggagatgggcgcggatggcgccaactacatgtccgtggagttcgtcggcggggctgtggagaggctgagcatatcaggcaggatgactctgtgcaacatgggtgttgagatgggagcaaaggctgcgatcgtcccgccggatgagagcgtcgacgcatacctcgctagaagagccagacgtccatacacgcacatccactcagacccgggatcatactacagagagatcgagtacgatgtgagcgatattcctccaatgattgcggctccataccgcgttgacaatgttcatccagtcagggatctggcaggcatcgaggtggaccaggtattcatcggcacatgtaccaacggaaggctggaggatctggagatggcagcccggatcgtgaagggcaaaagggttaagatcagaacgcttgtgatccccgcctccagagagatatatcttggtgctctgagatctggggtaattgagacccttgtcgaggccggcgcgatgatcggcccgccgggatgcggtccatgccttggcgcacacatgggagttctgggcgacggagaggtctgtttgtccacatcaaacagaaacttcccgggaaggatgggcagaaacggaaaggtctacctggcatcgcctgcaactgccgcagccacggcgatcacaggaaagatcacagatccaagggacgtatga

SEQ ID NO: 248 - DNA, 993 bp, Methanosarcina acetivorans C2A
  CDS (1)..(993)
atgaagctggcggttatcgaaggtgacggtatcggtcgtgaagttatcccggctgctgttgaagttctggacgcattcggtctggaactggaaaaagtttctctggaactgggttacgctcgctgggaacgtactggttctgcgatttctgaagaagatatcgcaactatcaaaggctgcgacgcagtactgttcggtgcggtaactaccgttccggatccgtcttacaaatctgtactgctgactattcgtaaagagctggacctgtacgctaacgtacgtccggttaagccgctgccaggtatcaccggtgttaccggtcgtaacgacttcgacttcatcatcgttcgtgaaaacactgaaggtctgtactccggtatcgaagaaatcggtccggacctgtcctggaccaagcgcgttgttactcgtaaaggttctgaacgcgttgctgaatacgcttgcaaactggcgaagcagcgtaaaaacaaactgactatcgttcacaagtctaacgtactgaaatctgacaagctgttcctggacgtttgccgtcaggttgcttcttctcacggtgttgaatacggtgacatgctggttgattccatggcttactctctgatgatgcgtccggacaaatacgacgttgttgttaccactaacatcttcggtgacatcctgtctgatatgtgcgcagcactggttggttctctgggtctggttccgtctgctaacatcggtgaaaaatacgcattcttcgaaccggttcacggttctgcaccggacatcgctggtaaaggtatcgctaacccgctggctgctatcctgtgcgtaaaaatgctgctggaatggtctggtcgcggtaaagaagcggcactgatcgaccgcgctatctcttacatcctggagaagaaactgatcactccggacctgggtggtgtttctaccactgcagaagttggtcagactgttgcgaaatacgtaatgcagaacctg

SEQ ID NO: 249 - protein, 331 aa, Methanosarcina acetivorans C2A
MKLAVIEGDGIGREVIPAAVEVLDAFGLELEKVSLELGYARWERTGSAISEEDIATIKGCDAVLFGAVTTVPDPSYKSVLLTIRKELDLYANVRPVKPLPGITGVTGRNDFDFIIVRENTEGLYSGIEEIGPDLSWTKRVVTRKGSERVAEYACKLAKQRKNKLTIVHKSNVLKSDKLFLDVCRQVASSHGVEYGDMLVDSMAYSLMMRPDKYDVVVTTNIFGDILSDMCAALVGSLGLVPSANIGEKYAFFEPVHGSAPDIAGKGIANPLAAILCVKMLLEWSGRGKEAALIDRAISYILEKKLITPDLGGVSTTAEVGQTVAKYVMQNL

SEQ ID NO: 250 - DNA, 996 bp, Methanosarcina acetivorans C2A
atgaaactcgcggtaatcgaaggtgatgggatcggcagggaagtaattcccgcagctgttgaagtcctggacgcgttcggacttgagcttgagaaagtgtctctggaactgggctatgcaagatgggaacggacagggagtgcgatctcggaagaagatatagccacaataaaagggtgcgacgctgttcttttcggggcggttaccacagtacctgacccgagttacaaaagtgtgcttctgacaatccgaaaggaacttgacctctatgccaatgtgaggcccgtaaaacctctccccggcataacgggcgttaccgggagaaatgatttcgattttattattgtcagggaaaatacggaaggactctactccgggattgaggaaataggccctgacctttcctggacaaaaagagtagttacccgaaaaggctctgagagggttgcagaatacgcctgcaagcttgcaaaacagagaaagaacaaacttaccattgtccacaaatccaacgtcctgaagtccgacaaactcttccttgatgtctgccggcaggttgccagctcccatggggtggaatatggcgacatgctggtcgattctatggcttatagccttatgatgcgccccgataagtacgatgttgtggttactacaaacatttttggagatatcctgagcgacatgtgcgcagcccttgtgggaagcctggggcttgtcccgagcgccaatataggggagaaatacgcctttttcgagcccgtacacgggagcgctccggacatcgcaggaaaaggtattgcaaaccctcttgcggcaatcctctgcgtgaagatgctgcttgaatggagtggcagggggaaagaagctgctcttattgacagagctatcagttacatactggaaaagaagctcatcactcctgacctcgggggcgtcagcaccacagcagaagtcgggcagacggtagcgaagtatgtaatgcagaatctttaa

SEQ ID NO: 251 - DNA, 987 bp, Methanospirillum hungatei JF-1
  CDS (1)..(987)
atgaagcgcgttgttgttgctccgggcgacggtatcggtccggaagttatcccgtctgcactggaagttctgcgcttcttccacccggaatgggaatacatcccggtttacctgggttacgaatgctggaaacgtactggcgacgcactgtctcagcgtactctggaaactctgaagaaagctgacctgatcctgttcggtgctatcaccactccgccagacccgaaataccactctgttgttctgcgtatccgtaaagagctggatctgtacgctaacctccgtccggtattcggtgaaggcttcgacatcctgatcgttcgtgaaaacactgaaggtctgtactccggtatcgagtggcaggaaaaagaccgcgcttgcactctgcgcgttgtttctgaagcgggttctcgccgtatcgctcgcttcgcttgcggttgcgcgaagcgtcgtcgtcgtcacctgactatcggtaacaaagctaacgttctgaaatctgactcctacttcctggatatctgcatggaagaagcagaaaaagctggtatctccatcgacaagaaatacatcgactctctggtactggacgtactgcagcacccaggtcgttacgacgttatcgttactaccaacatcttcggtgacatcctgtctgacgcagcagcattcctggaaggtggtctgggtatgctgccgtctgctaacatcggtcgtcaccaggcactgttcgaaccggttcacggttctgcgccggatatcgctggtaaaggtctggctaacccgatcgctgcaatccgctgcgtatctctgctgctgaaatacgttggcgagaagccgtctgcgattgaagttgaaaaagcgattcagaaaactatcgctgacggtatcaaaactccggatctgggtggtactgcgaccactgaagaagttggtcgtgcggtactgtctcacctggcttcttccaagaaagcagaaggtccggacctc

SEQ ID NO: 252 - protein, 329 aa, Methanospirillum hungatei JF-1
MKRVVVAPGDGIGPEVIPSALEVLRFFHPEWEYIPVYLGYECWKRTGDALSQRTLETLKKADLILFGAITTPPDPKYHSVVLRIRKELDLYANLRPVFGEGFDILIVRENTEGLYSGIEWQEKDRACTLRVVSEAGSRRIARFACGCAKRRRRHLTIGNKANVLKSDSYFLDICMEEAEKAGISIDKKYIDSLVLDVLQHPGRYDVIVTTNIFGDILSDAAAFLEGGLGMLPSANIGRHQALFEPVHGSAPDIAGKGLANPIAAIRCVSLLLKYVGEKPSAIEVEKAIQKTIADGIKTPDLGGTATTEEVGRAVLSHLASSKKAEGPDL

SEQ ID NO: 253 - DNA, 990 bp, Methanospirillum hungatei JF-1
atgaagcgggttgttgtggctcccggtgatggtatcggacctgaagtaataccttctgcacttgaggtgcttcggttctttcatcctgagtgggagtatattccggtatatttggggtatgagtgctggaagagaaccggagatgcattgtcacaaaggacacttgaaacgctcaaaaaggcggatctaatcctgtttggtgcgattacaacacctcctgatccgaagtatcacagtgtggtgctacggattcgaaaggaactggatctctatgcaaatctccgcccggtattcggagaagggtttgatattttgatcgtgcgggagaataccgaggggctctattcaggtatcgaatggcaggagaaggatcgtgcctgtaccctccgtgttgtcagtgaagcaggatcgcgtcggattgccagatttgcttgtggctgtgccaagcggagacgaagacatctgacaatcggcaataaggcaaatgtcctgaagtctgactcttatttccttgatatctgcatggaggaggctgaaaaggcaggaatatccatagataaaaagtatatcgactcactggttcttgacgtcctgcagcacccaggccggtatgatgtcattgtgacgacgaacatctttggggacatcctttcagatgcggctgcatttctggaagggggccttgggatgcttcccagcgcaaatattggacggcatcaggcactcttcgaaccagttcatggcagtgcccctgatattgccgggaagggtcttgcaaatcccatcgcagccatcagatgtgtatccctgcttcttaagtatgtcggagagaagcccagtgctattgaagtggaaaaggcgattcaaaagaccatcgccgacgggataaagactcctgatctcggaggtactgcaacaactgaggaagtgggacgggcagtcctatcacatcttgcatcatcaaaaaaggcagagggtccggacctctga

SEQ ID NO: 254 - DNA, 969 bp, Methanosphaera stadtmanae DSM 3091
  CDS (1)..(969)
atgtacaaaatcaccgttatcccaggtgacggtatcggtcaggaagtaatgcagccgactatcgacatcctggaaactctgaactccaagttcgaattcatcccgaaagaagctggtaaagagtgctaccagaaatacgataccaatctgccggaagaaaccatcgttcagtgccgcgaatctgactccactctgttcggtgcggtaacttccatcccgcagcagaagtctgcaatcgttactctgcgtaaagagctggatctgtacgttaaccagcgtccgatccactcttacaccaacccggatatcgacttcactatcatccgtgaaaactctgaaggtctgtactctcacatcgaagaatccactggcgacgaagctatcgctatccgtaagatcacttacaaagcgtctgaacgtatcatcaactacgcattcaactacgcactgaaaactgaaaaatctaaagttactgcttctcacaaagctaacgttctgccggtaactgacggtatcttcaagaacaccttctacaaagttgcttctaactacccgactatcaagtctaacgactactacatcgacgcaatggcgatgtacctgatcactaacccggcacagttcgacatcatcgttactaccaacctgttcggtgacatcctgtctgacgaaggtggtggtctggttggtactctgggtctgattccgtctgctaacatcggtgacaaaaccggtctgttcgaaccggttcacggttctgcaccggacatcgctggtctgaacaaagctaacccgatcgcgatgatcctctcttcctgcctgatgctggaatacctgggtctgtacgacgacgcgaagcgcattcagaacgctgttgaagaaaccatttctgaatccaaagttaaaactccggatatgggtggtcacaacaacactcaggacgttgctaacaacatcctgcacagacta

SEQ ID NO: 255 - protein, 323 aa, Methanosphaera stadtmanae DSM 3091; identical to SEQ ID NO: 39

SEQ ID NO: 256 - DNA, 972 bp, Methanosphaera stadtmanae DSM 3091
ttgtataaaataacagtaatacctggtgatggtataggacaagaagttatgcaaccaacaatagatattcttgaaacattaaattctaaatttgaatttataccaaaagaagcaggaaaagaatgttatcaaaaatatgatacaaatctacctgaagagactattgttcaatgtagagaaagtgatagtacactctttggagcagtaacatcaattccacaacaaaaaagtgcaatagtgacattacgtaaagaacttgatttatatgtaaatcaaagaccaatacattcatatacaaatccagatatagattttacaataatacgtgaaaattctgaaggactatattcacatattgaagaaagtactggtgatgaagcaatagccattagaaaaataacatacaaagcttcagaaagaataataaattatgcttttaactatgcacttaaaacagaaaaaagtaaagtaacagcatcacataaagcaaatgtactaccagtaactgatggaatatttaaaaatacattctataaagtagcaagtaattatccaacaatcaaatccaatgattattatatagatgctatggcaatgtatcttataacaaatcctgctcaatttgatattatagtaacaacaaatctctttggagacatattatctgatgaaggtggaggattagttggaactcttggacttataccttcagcaaatattggggataaaactggattatttgaaccagtacatggatcagcaccagatatagcaggacttaataaggcaaatccaatagcaatgatcttatcaagttgtttaatgcttgaatatttaggattatatgatgatgcaaaaagaattcaaaatgcagtagaagaaacaatttctgaaagtaaagttaaaacaccagatatgggtggacataacaatacacaagatgttgcaaataatatactccatagattataa

SEQ ID NO: 257 - DNA, 969 bp, Methanosaeta thermophila PT
  CDS (1)..(969)
atgaagaagatcgctctggttccgggcgacggtatcggtccggaagttatctcttccgcactgcgcgtactgaacgcagcaggcttcgacggtgaactggttgaattcgacatcggttacggtcgctggcgtcgcgacggtaaagcgatcactgacgacgatatcgaacgtatgaaagactgcgactgcatcctgttcggtgcaatcaccactccgccggatccgggttaccgttctgtactgatccgcattcgtaaagagctggatctgtacgctaacatccgtccgctgcgttcttctcgcatcgacgttatcatcgttcgtgaaaacactgaaggtctgtactccggtctggaaatgctgggtgacgaagaagcgcgtaccgttcgcgttatcactcgtaaaggttctcagcgtattgctgaagttgcttgccgtatcgcttctgaacgtaagcacctgactatcatccacaaagctaacgtactgaaatctgacgttctgttcctgaaaacttgccgtgaagttgctgaacgttacggtatccgctacgacgacatgctggttgacgctgctgcttacaacatggttatccgtccggaaatgttcgacgtaatggttactaccaacctgttcggtgacatcctgtctgacgaaggtgcgggtatcgttggttctctgggtctgtgcgcatctgctaacctgggtgaccgctgggcgctgttcgaaccaatccacggttctgcaccggatatcgctggtaacggtattgctaacccggttggtgcaatccgttctgcagcaatgatgctggagtggttcggtgaaatggaacgtgctcagtctatccaccaggcggttgaccgtactctgtctaaaggcgttaaaactccggatctgggtggtctgtgcaccacttctgaattcactgacgcggttatcgacgaaatgcgtcgcgctggcgcgtgt

SEQ ID NO: 258 - protein, 323 aa, Methanosaeta thermophila PT
MKKIALVPGDGIGPEVISSALRVLNAAGFDGELVEFDIGYGRWRRDGKAITDDDIERMKDCDCILFGAITTPPDPGYRSVLIRIRKELDLYANIRPLRSSRIDVIIVRENTEGLYSGLEMLGDEEARTVRVITRKGSQRIAEVACRIASERKHLTIIHKANVLKSDVLFLKTCREVAERYGIRYDDMLVDAAAYNMVIRPEMFDVMVTTNLFGDILSDEGAGIVGSLGLCASANLGDRWALFEPIHGSAPDIAGNGIANPVGAIRSAAMMLEWFGEMERAQSIHQAVDRTLSKGVKTPDLGGLCTTSEFTDAVIDEMRRAGAC

SEQ ID NO: 259 - DNA, 972 bp, Methanosaeta thermophila PT
atgaagaaaatcgctcttgtgccgggcgatggcatcgggcctgaggtcatatcgagcgctcttcgtgtcttgaatgcagcaggattcgatggggagctcgtagagttcgatataggctatggcagatggaggcgtgatggaaaggccataacagatgatgatatagaaaggatgaaggattgcgactgcatactcttcggggcgatcacgactcctcctgatcctggttataggagtgtcctgataaggataagaaaggagctggacctgtatgcgaacatacgccccctgcgctcgagcaggatcgatgtgatcattgtgagggagaacaccgaggggctgtattcaggtctggagatgctcggcgatgaagaggccaggaccgtgcgtgtcataacgagaaaggggagccagaggatagccgaggtggcgtgcaggatcgcatcggaacgcaaacatctcacaataatacacaaggcgaacgtcctgaagagcgacgtgctgtttttaaaaacatgcagggaggtcgctgaaaggtatggaatcaggtatgatgatatgctggttgatgccgcggcatacaacatggtgataaggccggagatgtttgatgtgatggtgacgacaaatctcttcggggacattctcagcgatgagggcgccggcattgtcggcagcctggggctctgcgccagcgcgaatctgggcgatcgctgggcgctcttcgagccgatacacggcagcgcgcccgacattgcaggcaatggcatagcaaacccggtgggagccatacggagcgctgcgatgatgctcgagtggttcggtgagatggagagggcgcagtcgatccatcaggcggtggaccgcacgctctcgaaaggggtgaaaacgccggatctgggcggcttgtgcacgacatctgagttcacagatgcggtcatcgatgagatgaggcgcgccggagcatgttga

SEQ ID NO: 260 - DNA, 1215 bp, Methanosarcina acetivorans C2A
  CDS (1)..(1215)
atgtctgaatctgaacagtactcccgtaacaccctgatggacttcatcgaataccgtccgctggatatcgaaatctgcgacgtaactctgcgtgacggtgaacagactccgggcgtagtattcaccaaagagcagaaactggcggttgcttctgaactggactccatgggtatcgaagttatcgaagcaggcttcccggttgtttctgcttacgaaaaagaaatcgttaaagaaatcgctaaccagggttacgactcccgtatctgctgcctgtctcgcgctgttaaaggcgacgttgacgcagcactggactgcgacgttgatatcgtttccatcttcatcgcgatgtctgacatgcacctgaaatacaaataccaccgtactctggaagatatgctgggttgcgcaaaagaagctatcgaatacgcaactgaccacggtctgaacgttcgcttcgctgcagaagatgcttcccgtactccgatcgaccgcctgaagcaggcattcaaagaagttgaaaacgaatacaaagttcagtacgtttctctggctgacaccatcggtattctgaacccgactaccactcactacctggtttctgaaatcttcaaatgcgtaaacacctctatctgcatccactgccacgacgacctgggtatggcaactgcgaacaccctggcagctgctgaagctggcgcgaagcagctgcacaccaccgttaacggtatcggtgaacgcgctggtaacgcttctctggaagaaatgctggttgctctgcgcgtacagtacggtatcgaacgttacgacactaccaagctgactgcgctgtctcgtatgatctctgaatactccaacatcactccgtctgttaacaaagcggttgttggtcagaacgcattcactcacgaatccggtatccacgttgctgcgattctggaagaaccgcgtacttacgaactgttcctgccagaaatggttggtggtaagcgtaacctggttgttggtaagcacactggcaccaaagcgctgaaaggtatcatcaactccatcggcttctgcctggaacgtgaagaactgtgcgcactgatcgaaaaagttaaagtttgcactgacgagaagcgccgttctatctctcgcgagcagctggaaaaactgatcgctcaggtacgtcaggaacagaagccgtctgcttctgaaaaagagaagttctccatt

SEQ ID NO: 261 - protein, 405 aa, Methanosarcina acetivorans C2A
MSESEQYSRNTLMDFIEYRPLDIEICDVTLRDGEQTPGVVFTKEQKLAVASELDSMGIEVIEAGFPVVSAYEKEIVKEIANQGYDSRICCLSRAVKGDVDAALDCDVDIVSIFIAMSDMHLKYKYHRTLEDMLGCAKEAIEYATDHGLNVRFAAEDASRTPIDRLKQAFKEVENEYKVQYVSLADTIGILNPTTTHYLVSEIFKCVNTSICIHCHDDLGMATANTLAAAEAGAKQLHTTVNGIGERAGNASLEEMLVALRVQYGIERYDTTKLTALSRMISEYSNITPSVNKAVVGQNAFTHESGIHVAAILEEPRTYELFLPEMVGGKRNLVVGKHTGTKALKGIINSIGFCLEREELCALIEKVKVCTDEKRRSISREQLEKLIAQVRQEQKPSASEKEKFSI

SEQ ID NO: 262 - DNA, 1218 bp, Methanosarcina acetivorans C2A
atgtcagagagcgagcagtactccagaaatacacttatggacttcatcgaatatcgccccctcgatatcgaaatctgtgacgtgaccctgcgcgatggggaacagacccctggtgttgtgttcacgaaagaacagaagctggcagtagccagcgagcttgattccatgggtattgaggttatagaagccggctttccggtagtttccgcatacgaaaaagaaatcgtaaaggaaatcgcaaaccagggttatgattccaggatctgctgcctctcaagagcagtaaagggagatgttgatgctgcccttgattgtgacgtcgatatcgtcagcattttcattgcaatgtccgacatgcacctcaaatacaagtaccacaggactcttgaggatatgctgggctgcgctaaggaagctattgaatatgcaactgaccacggtttaaacgtacgttttgcagccgaggatgcaagccgcactccgattgaccgcctcaagcaggctttcaaggaagttgagaacgagtataaagtgcagtacgtaagcctggcagatacaatcggtatcctgaacccgaccaccacccattaccttgtaagtgaaatcttcaagtgcgtaaacacttcaatctgcatccactgccacgatgacctcgggatggctacggctaacacccttgcagccgccgaagccggagcaaagcagctccatacgacagtcaacgggattggagaaagggccggaaacgcttctcttgaagaaatgctggttgcccttagggtacagtacggaattgaacgttatgatacaacaaagctgaccgcgctctccagaatgatttcggaatactcaaacatcaccccctcagtaaacaaagccgttgtaggccagaacgcctttacccatgagtccggaattcacgtcgctgcaatcctggaagagccgcgcacttacgaactcttccttcccgagatggtaggtggaaagcgcaaccttgttgtcgggaagcataccgggacaaaagccctgaaagggatcatcaacagtatcggtttctgccttgaacgggaagaactctgcgccctgatcgaaaaagtcaaggtctgtaccgacgaaaagcgaagaagcatttcaagggagcagcttgaaaaactgatagctcaggtcaggcaggagcagaaaccttccgccagcgaaaaagaaaagttttctatctga

SEQ ID NO: 263 - DNA, 1179 bp, Methanospirillum hungatei JF-1
  CDS (1)..(1179)
atgaagccgtggcacatcgaaatctgcgacgtaactctgcgtgacggtgaacagactccgggcgtttctttcactgctgacgagaagaaagacatcgcttctcgcctggatgctatcggtatcgaagttatcgaagcgggtttcccgatcgtttctgcacacgaaaaagaaatggttcgtaacatctcccgtctgggtctgtctgcgaaaatctgcggtctgtctcgcgcttgccgcgaggacgttgacgctgcactggatgctgaagttgacatgatcggtctgttcatcgctccgtctgatctgcacctgaaatacaaacacaagaagccgcgtgacgttgttgttgctaacgcgctggaacagctggactacgctgttgaccacggtctgatcgttcgtttcggtgcagaagatgcttcccgtactgacccggacatcctggttgacatctaccgtcaggcagctgaccacaaagcgacttacgttacttacgctgacaccactggctgcctgactccgctggaagttgcaaccgtaatgaaagacctggttccgaaaactccgattccgatcgcgatgcacgcgcacaacgacctgggttgcgcaactgctaacaccctgatcgctgcagaactgggtgcttaccagctgcacaccaccgttaacggtctgggtgaacgtgcgggtaacgcgcgtctggaagaagttctggtttctctggtactgaaaggtggtatcactcgctacgacctgactgaaatcccggcactgtctgaacgcgtacagcagtacaccggtatcttcatgccggcaaccaagccggttgttggtgctaacgcattcgctcacgaatccggtatccacattgctgcaatcctggaaaacccggaaacttacgaattcatcccgccagaactgctgggtctggaacgtcgcttcatcctgggtaagcacaccggtaaacgtgcgctggttcacattctgacttctttcggttaccacatcactgacgaacaggtaatgcaagttctggaactgatcaaagacaaatctgaagataaatgctccatcaaccagcgtgtactggcagaaatcatctctcaggttaccggtgaagataaaatcaacggtgacatcatcggcgaggactcccgctgcccaggtcgtcacgtttac

SEQ ID NO: 264 - protein, 393 aa, Methanospirillum hungatei JF-1
MKPWHIEICDVTLRDGEQTPGVSFTADEKKDIASRLDAIGIEVIEAGFPIVSAHEKEMVRNISRLGLSAKICGLSRACREDVDAALDAEVDMIGLFIAPSDLHLKYKHKKPRDVVVANALEQLDYAVDHGLIVRFGAEDASRTDPDILVDIYRQAADHKATYVTYADTTGCLTPLEVATVMKDLVPKTPIPIAMHAHNDLGCATANTLIAAELGAYQLHTTVNGLGERAGNARLEEVLVSLVLKGGITRYDLTEIPALSERVQQYTGIFMPATKPVVGANAFAHESGIHIAAILENPETYEFIPPELLGLERRFILGKHTGKRALVHILTSFGYHITDEQVMQVLELIKDKSEDKCSINQRVLAEIISQVTGEDKINGDIIGEDSRCPGRHVY

SEQ ID NO: 265 - DNA, 1182 bp, Methanospirillum hungatei JF-1
atgaaaccatggcacattgaaatttgtgatgtcactcttcgggacggtgaacagacccctggagtatcattcactgctgatgagaagaaggatatcgcatcccggcttgatgcaatcggaattgaggtgattgaagccggatttcctattgtatccgcccatgaaaaggagatggtccggaatatctcccggctgggtctctcggcaaagatatgtggtctgtcacgggcctgcagggaggatgtggatgcagcgcttgatgctgaagttgacatgatcgggctttttattgccccttctgatctgcatctgaaatacaagcataaaaagccccgggatgttgttgttgcaaatgctcttgaacagcttgattatgcggtggatcatggtcttatcgtccggtttggtgctgaagatgcatcccgtaccgaccctgatatcctcgttgacatctaccggcaggcagcagatcacaaggcgacctatgtcacatatgcagatacgaccgggtgtctgacccctcttgaggtcgctacggtcatgaaggatcttgtccccaaaacgcccatcccgattgccatgcatgctcataatgatctcgggtgtgcgacggcaaatacactcattgccgcagaactgggagcgtatcagttgcataccacggtgaacggccttggtgaacgggcagggaatgcacggctagaggaggttttggtatcactcgtgctcaaaggcgggattacccggtatgatctcacagagattccggctctttcagaacgggttcaacagtataccgggatttttatgcctgcaacgaaaccggtggtcggtgcgaatgcgtttgcccatgagagtgggattcatattgcagctattctggaaaatccggagacctacgagttcatacccccagagctcctgggactggaacggcggtttatcctggggaagcataccggaaagcgtgctctggtgcatattctgacttcttttggctatcacatcaccgatgagcaggttatgcaggttcttgaattgataaaggataaaagtgaggataaatgcagtatcaaccagcgggtgcttgcggagatcatctcccaggtaaccggggaggataagatcaatggtgacattatcggagaagattctaggtgccccggccggcacgtatattga

SEQ ID NO: 266 - DNA, 837 bp, Methanosphaera stadtmanae DSM 3091
  CDS (1)..(837)
atgggtctgtctgatctgcacctggaagttaaaatcaacaagccgcgcgacgttgttaaccagatctgcatggacgctatcgactacggtaaagaccacggtctgttcgtagcattctctgcagaagatgcaactcgtactgaactgccgaaactgctggacgtttacaagcaggcgcaggaccacggtgctgaccgcattcacattgctgacaccactggttctatcaacccgtacgcaactcagtacctggttaaaaacatcaagaaagagatcgacactgaaatcgcgctgcactgccacaacgacttcggtttcgctgttgctaactccatcgctggtctgttcgaaggtgcaactgctatctccactaccgttaacggtatcggtgaacgtgctggtaacgcatctctggaagagctgatcatgtctctgaaactgctgtacaacaaagacctgggcttcaaaactgaagttatctacgaactgtctcagctggtatctaaatactccaagatcccaatctctgactccaaagcgattgttggtaacaacgtattccgtcacgaatccggtatccacgtagacgctatcgttaaaaacccgctggcttacgaaccgttcatcccggaaatgatcggcaccaagcgtcagatcgttctgggtaaacactctggtaaatctgcggttatcgaaaaactggatactctgaacatcaaagttgatgacactcagctgtctcagatcgtttctctggttaagcaggaacgtgaacgtggtgaagaaatcactaacaacaagttcgacgaaatcctggaaaaagttaacatcaaaagg

SEQ ID NO: 267 - protein, 279 aa, Methanosphaera stadtmanae DSM 3091; identical to SEQ ID NO: 9

SEQ ID NO: 268 - DNA, 840 bp, Methanosphaera stadtmanae DSM 3091
atgggattatcagacctacatctagaagttaaaataaacaaaccacgagatgtagtaaatcaaatatgtatggatgcaatagattatggtaaggatcatggactatttgtagcattctctgctgaagatgcaacaagaacagaacttccaaaacttcttgatgtatataaacaagcacaagatcatggagcagacagaattcatatagcagatacaacaggttcaataaatccatatgcaacacagtacttagtaaaaaatattaaaaaagaaatagatacagaaatagcactacactgtcataatgactttggatttgcagttgcaaattccattgcaggattatttgaaggcgcaactgcaatatctacaacagtaaatggtataggtgaaagagcaggaaatgcctctctagaagaattaataatgtcattaaaactattatataataaggatttaggatttaaaacagaagtaatctatgaactatcacaacttgtatcaaaatatagtaaaattccaatatcagatagtaaagctatagttggaaacaatgtatttagacatgaatcaggaatacatgtagatgcaatagtaaaaaatccattagcatatgaaccattcattccagaaatgattggaacaaaaagacaaatagttctaggaaaacattcaggtaaatcagcagtaatagaaaaattagacacattaaatataaaagtagatgacacacaattatcacaaatagtttccctagtaaaacaagaacgtgaaagaggagaagaaataacaaataataaattcgatgaaatactagaaaaagttaatattaaaagatga

SEQ ID NO: 269 - DNA, 1143 bp, Klebsiella pneumoniae
  CDS (1)..(1143)
atggagcgcgttctgatcaacgacaccactctgcgcgacggcgagcagtctccgggcgtagcgttccgtacttctgaaaaagttgctatcgctgaagcgctgtacgctgctggtatcactgcaatggaagttggtactccggcaatgggcgacgaagagatcgctcgcattcagctggttcgtcgtcagctgccggacgcaactctgatgacctggtgccgtatgaacgcgctggaaatccgtcagtctgcagacctgggtatcgactgggttgatatctccattccggcatctgacaagctgcgtcagtacaaactgcgtgaaccgctggcggtactgctggaacgtctggcgatgttcatccacctggcgcacactctgggtctgaaagtttgcatcggttgcgaagatgcttctcgcgcttctggtcagactctgcgcgctatcgctgaagttgctcagaacgcgccggctgctcgcctgcgttacgctgacaccgttggtctgctggatccgttcaccactgcagctcagatctccgcactgcgcgacgtatggtctggtgaaatcgaaatgcacgcgcacaacgacctgggtatggcgactgctaacaccctggcagctgtttctgctggcgcaacttctgttaacaccaccgttctgggtctgggtgaacgtgctggtaacgcagctgcatggaaaccgtctgcactgggtctggaacgttgcctgggtgttgaaactggcgttcacttctctgcactgccggcactgtgccagcgcgttgctgaagcagctcagcgtgctatcgacccgcagcagccgctggttggtgaactggtattcactcacgaatccggtgttcacgttgctgcgctgctgcgcgactctgaatcctaccagtctatcgcgccaagcctgatgggtcgttcttaccgtctggttctgggtaagcactctggtcgtcaggctgttaacggcgtattcgaccagatgggttaccacctgaacgctgcgcagatcaaccagctgctgccggcaatccgtcgcttcgctgaaaactggaaacgttctccgaaagactacgaactggttgctatctacgacgaactgtgcggtgaatccgcactgcgtgcgcgtgga

SEQ ID NO: 270 - protein, 381 aa, Klebsiella pneumoniae; identical to SEQ ID NO: 76

SEQ ID NO: 271 - DNA, 1146 bp, Klebsiella pneumoniae
atggaacgcgtgctgattaacgataccaccctgcgcgacggcgagcagagccccggcgtcgcctttcgcaccagcgaaaaggtcgccattgccgaggcgctttacgccgcaggaataacggcgatggaggtcggcaccccggcgatgggcgacgaggagatcgcgcggatccagctggtgcgtcgccagctgcccgacgcgaccctgatgacctggtgtcggatgaacgcgctggagatccgccagagcgccgatctgggcatcgactgggtggatatctcgattccggcttcggataagctgcggcagtacaaactgcgcgagccgctggcggtgctgctggagcggctggcgatgtttatccatcttgcgcataccctcggcctgaaggtatgcatcggctgcgaggacgcctcgcgggccagcggccagaccctgcgcgctatcgccgaggtcgcgcagaatgcgccggccgcccgcctgcgctatgccgatacggtcggcctgctcgacccttttaccaccgcggcgcaaatctcggccctgcgcgacgtctggtccggcgaaatcgaaatgcatgcccataacgatctgggtatggcgaccgccaatacgctggcggcggtaagcgccggggccaccagcgtgaatacgacggtcctcggtctcggcgagcgggcgggcaacgcggccgcatggaaaccgtccgcgctgggccttgaacgctgcctgggcgtggagaccggcgtgcatttttcggcgctgcccgcgctctgtcagagggtcgcggaagccgcgcagcgcgccatcgacccgcagcagccgctggtcggcgagctggtgtttacccatgagtcaggtgtccacgtggcggcgctgctgcgcgacagcgagagctaccagtccatcgccccttccctgatgggccgcagctaccggctggtgctgggcaaacactccgggcgtcaggcggtcaacggcgtttttgaccagatgggctatcacctcaacgccgcgcagattaaccagctgctgcccgccatccgccgcttcgccgagaactggaagcgcagcccgaaagattacgagctggtggctatctacgacgagctgtgcggtgaatccgctctgcgggcgagggggtaa

SEQ ID NO: 272 - DNA, 1158 bp, Methanococcus vannielii SB
  CDS (1)..(1158)
atggactggaaagaagtttctcagtacaacccgaaactggacctgaaagagtgctacgtttacgacaccactctgcgtgacggtgaacagactccgggcgtttgcttcaccggtaaccagaaactggaaatcgcgaagaaactggatgacctgggtatcaagcagattgaagctggcttcccgaccgtttctgaaaacgaacgtaagtgcatcaaatctatctcttctgaaggtctgaacgctgacatcctggcgctgtctcgcgtactgaaagaagatatcgaccgcgctatcgagtgcgacgttgacggtatcatcactttcgttgcaacttctccgatgcacctgaaatacaaactgcacaaatctttcgaagaagttgaagagatgggtatgaaagcaatcgaatacgctaaagaccacggtctgttcgttgcattctctgctgaagatgcaactcgtacttccatcgaaaacatcatcaaaatccacaaaaacgctgaagattacggtgctgaccgcgttcacatcgctgacactctgggttgcgcaactccgcagtctatgtaccagatctgctctgaactgaacaagtctctgaagaaagcgcacatcggtgttcactgccacaacgacttcggtttcgctgctatcaactccatctacggtctgatgggtggtgcgaaagcggtttccactaccgttaacggtatcggtgaacgtgctggtaacgctgcactggaagaagttgtaatggcgctgaaagttctgtacaactacgacatgggtctgaacactgaactgatcatggaaacttctaaactggttgaaacttactccaaaatcaaagttccggaaaacaagccgctggttggtgaaatggtattctaccacgaatccggtattcacgttgacgcagtactggaaaacccgctgacttacgaaccgttcctgccagagaagatcggtcagaagcgtaagatcgttctgggtaaacactctggttgccgtgctgttgcttaccgtctgaacgaactgggcttcgaagcaactcgcgacgaactgtgggaaatcgttaagaaaaccaaagaaactcgtgaacagggtactgaaatctctgacgaagtattcaaaaacatcgttactcacattcttaac

SEQ ID NO: 273 - protein, 386 aa, Methanococcus vannielii SB; identical to SEQ ID NO: 12

SEQ ID NO: 274 - DNA, 1161 bp, Methanococcus vannielii SB
atggattggaaagaagtttctcaatataatcctaaattagacttaaaagaatgttatgtatatgatactacattaagggatggtgaacagactcctggagtttgttttacgggtaatcaaaagcttgaaattgctaaaaaattagatgaccttggaataaaacaaattgaagccggttttccaacggtttctgaaaatgaaagaaaatgtattaaatcaatttcctctgaaggacttaatgcggatattttggcgctatcaagagttttaaaggaagatatcgatagggcgattgaatgcgatgttgatggaataatcacttttgttgcaacttcgcctatgcacctaaaatataagctacataagtcttttgaagaagttgaagaaatgggaatgaaagctatcgagtatgcaaaagatcatggcctttttgttgcgttttctgcagaagatgcaacaagaacctcgattgaaaatatcataaaaattcataaaaatgcagaagattacggtgcagatagggtccatattgcagatacacttggatgtgcaacacctcaatcaatgtaccaaatatgttctgaactgaataaaagcctgaaaaaagcacatattggagttcattgccataatgattttggatttgcagccataaattcaatatacggacttatgggtggtgcaaaggcagtttcaactactgttaatggcattggagaaagggccggaaatgcagcactagaagaggtagtaatggctttaaaagtactttataattacgatatggggctaaatactgaacttataatggaaacttcaaagttagttgaaacatattcaaaaatcaaggttccagaaaataagcctcttgttggcgaaatggtattttatcatgaaagcggaatacacgttgatgcagttttagaaaatcctttaacctatgagccgtttttacctgaaaaaatcggtcaaaaacgaaaaattgtgcttggaaaacattctggatgcagagccgttgcatatagattaaatgaacttggatttgaagcgactcgtgatgaactctgggaaattgttaaaaaaactaaggaaacgagagaacaaggaaccgaaataagtgacgaagtatttaaaaacattgtaacacatattttaaattaa

SEQ ID NO: 275 - DNA, 1170 bp, Methanobrevibacter smithii ATCC35061
  CDS (1)..(1170)
atgcagtactacatctctcactacaacaaagagccggaactgaacttcccggatgaaatcaccgtttacgacaccactctgcgtgacggtgaacagactccgggcgtttgcttctctccggaagagaagctggaaatcgcgaagaaactggatgaagttaaaatcaagcagatcgaagcaggcttcccgatcgtttccaagaaagagcaggaatccgttaaagcaatcacttctgaaggtctgaacgcacagatcatctctctgtctcgtaccaagaaagaagatatcgacgctgcactggactgcgacgttgacggcgttatcactttcatgggtacttctgacatccacctggaacacaaaatgcacattggtcgtcaggaagcgctgaacacttgcatgaacgctatcgaatacgctaaagaccacggtctgttcgttgcattctctgcagaagatgcaactcgtactgacctggacttcctgaaacgtatctacaacaaagctgaatcctacggtgctgaccgcgttcacattgctgacaccactggcgcaatcactccgcagggtatcacttacctggttaaagaactgaagaaagacgtaaacatcgacatcgcgctgcactgccacaacgacttcggtctggcggttatcaactccatctccggtgttctggcgggtgctaacggtatctccactaccgtaaacggtatcggtgaacgcgctggtaacgcttctctggaagaagttatcatgtctctgaaactgctgtacggtaaagacctgggcttcaaaaccaagcacatcaaagaactgtctgaactggtttctaaagcgtctggtctgccggttccgtacaacaagccggttgttggtaacaacgtattccgtcacgaatccggtattcacgttgatgctgttatcgaagagccgctgtgctacgaaccgtacatcccagaactggttggtcagaaacgtcagctggtactgggtaaacactctggttgccgcgctgtacgcgctaaactgaacgaatgcgacctggacgtttctgacgacactctgatcgaaatcgttaagaaagttaagaaatctcgtgaagaaggtacttacatcaacgacgacgtattcaaagaaatcgttaaatcctgcaactacaagaaagaa

SEQ ID NO: 276 - protein, 390 aa, Methanobrevibacter smithii ATCC35061; identical to SEQ ID NO: 11

SEQ ID NO: 277 - DNA, 1173 bp, Methanobrevibacter smithii ATCC35061
ttgcaatattatatcagtcattataataaagaaccggaattaaattttcctgatgaaattacagtttatgatacaactttaagagacggtgaacaaaccccaggagtttgttttagtcctgaagaaaagttagaaattgctaaaaaattagatgaagttaaaattaaacaaattgaagcaggttttcctatagtttccaaaaaagaacaggaatcagtgaaagccataacttcagaaggccttaatgctcaaatcatttctttatctagaacaaaaaaagaagacattgatgctgctcttgattgtgatgttgacggtgttattacatttatgggaacttcagacatccatttagaacacaaaatgcacatcggacgtcaggaagcactgaatacatgtatgaacgctattgaatatgctaaagatcacggattatttgttgcattttctgcagaagacgcaaccagaactgatttggatttcttaaaaagaatatacaacaaggctgaaagctatggagcagacagagtacacatagcagacactaccggtgctataactccgcagggaattacttacctggtaaaagaacttaaaaaagatgtaaatatagatattgctctacattgtcacaatgatttcggtctggcagttataaattccatatccggagtactggcaggagctaatggaatttccacaacagtaaacggtatcggagaacgtgcaggaaacgcatctcttgaagaagtaattatgtctcttaaattattatacggtaaagatttaggatttaaaaccaaacatattaaagaactttccgaacttgtatcaaaagctagcggattgcctgttccctataacaaacctgtagtaggaaacaacgtattcagacacgaatccggaattcatgttgatgcagttattgaagagccgttatgttatgaaccatatattccagaactggtaggacaaaaaagacagcttgtattaggtaaacattcaggctgcagagcagtcagagccaaattaaatgaatgtgaccttgatgtaagcgacgatacccttattgaaattgttaaaaaagttaaaaaaagcagagaagaaggaacatacattaacgatgatgtattcaaagaaattgtaaaaagttgtaactataaaaaagaatag

SEQ ID NO: 278 - DNA, 1161 bp, Methanococcus aeolicus Nankai 3
  CDS (1)..(1161)
atgaactggaaagaagtttgccagtacaacccgaaactgaacctggaagattgctacatctacgataccactctgcgcgacggtgaacagactccgggcgtttgcttctccatggagcagaaactggacatcgctaagaaactggacgaactgggtgttaagcagatcgaagcgggtttcccggctgtttctaaatctgaaatcgaaaacgttaagaaaatcgctaacgaaggtctgaacgctgaaatcctggcactgtctcgcgcactgcagggcgacatcgacaaagcgctgtcctgcgacgttgacggtatcatcactttcatcgcggcatctccgctgcacctgaaatacaaactgcacaaatctatcgaagaagttgaagagatgggtatgaaagcggtagaatacgctaaagaccacggtctgttcgttgcattctctgcagaagatgcaactcgtactccgatcgaagatctggtacgtattcacaaaaacgctgaagagcacggtgctgaccgcgttcacattgctgacaccactggctgcggtactccgcagtccattcagtacatctgctctgaactgtctaacaacctgaagaaagctcacatcggcgtacactgccacaacgacttcggtctggcggttatcaactccatctacggtctgctgggtggtgcgaaagctgcttctactaccgttaacggtatcggtgaacgtgctggtaacgcaccgctggaagaactgctgctgaccatgaacgtactgtacgacgttaaaactgacctgaacatctccatcatcaaagaactgtctaccatggttgaaaactactccggtatcaaaatcccggttaacaagccaatcgttggtgacaaagtattctaccacgaatccggtatccacgttgacgctgttatcgaaaacccgctgacttacgaaccgttcctgccggaacgtatcggtcagaagcgtgaaatcgttctgggtaaacactctggttgctccgcagtagaatccaagctgaaagagctgggtctggaagttccgaaagaccgtatctgggacctggttaagaaagttaaaaccactcgtgaaggtggtgaagatatcgacgacgaaatgttcatcaagatcgttgacatcatcaacaagcag

SEQ ID NO: 279 - protein, 387 aa, Methanococcus aeolicus Nankai 3; identical to SEQ ID NO: 13

SEQ ID NO: 280 - DNA, 1164 bp, Methanococcus aeolicus Nankai 3
atgaattggaaagaagtttgtcaatataatccaaagttgaatttggaggattgctatatttatgatactacacttagagatggggagcaaactccgggagtttgtttttcaatggaacaaaaattggatattgctaaaaaattagatgaattgggggtaaagcagattgaagcaggttttccagccgtatctaaatcagaaatagaaaatgtaaaaaaaatagcaaacgaaggactaaacgctgaaatattggcgttatctcgggcactacaaggagatattgataaggcattatcctgtgatgtagatgggattattacatttatagcagcttctcctcttcatttaaaatataaacttcataaaagcatcgaggaagtagaagagatgggaatgaaggcagtggaatatgcaaaagaccacgggctatttgtagctttttcggctgaagatgctacaaggacaccaattgaggaccttgtaagaattcataaaaatgcagaggaacacggagcagatagggttcatatagcagatactacgggctgtggaacaccacaatccatacaatatatatgttcagaacttagcaataatttaaaaaaggcacatattggagttcattgccataatgattttggacttgccgtaataaattctatttatggactattgggtggtgcaaaagcagcatctaccacagtaaatggaattggggaaagagctggaaatgcacctttggaggagctcctattaactatgaatgtattatatgatgtaaaaactgatttaaatatctcaataataaaggaattatcgacaatggttgaaaactattcggggataaaaataccagtaaataagccgatagtaggggataaagtattttatcatgaaagcggaattcatgttgatgcagtaattgaaaatccactaacttatgaaccatttttgccggaaagaatcgggcaaaaacgagaaattgtattgggaaaacattctggttgtagtgcagtcgaatcaaaattaaaagagcttggcttagaagttccaaaagatagaatatgggatttagttaaaaaagtaaaaaccaccagagaaggcggggaagatatagacgatgagatgtttataaaaatagtagatataataaataaacaataa

SEQ ID NO: 281 - DNA, 1158 bp, Methanococcus maripaludis S2
  CDS (1)..(1158)
atggactggaaagcggtttctccgtacaacccgaaactggatctgaaagactgctacctgtacgacaccactctgcgtgacggtgaacagactccgggcgtttgcttcgctggcgaccagaaactggaaatcgctaagaaactggacgaactgaaaatcaagcagatcgaagcaggcttcccgatcgtttctgaaaacgaacgtaaagcaatcaaatctatcactggcgaaggtctgaacgctcagattctggcactgtctcgcgtactgaaagaagatatcgacaaagcgattgagtgcgacgttgacggtatcatcactttcatcgctacttctccgatgcacctgaaatacaaactgcacaaaaacctggatgaagttgaagagatgggtatgaaagcggttgaatacgctaaagaccacggtctgttcgttgcattctctgcagaagatgcaactcgtactccgctggaagatatcatccgtatccacaaaaacgctgaagaacacggtgctgaccgcgttcacattgctgacactctgggttgcgcaactccgcaggcaatgtaccacatctgctctgaactgtccaagcacctgaagaaagcgcacatcggtgttcactgccacaacgacttcggtttcgctgttatcaactccatctacggtctgatcggtggtgcgaaagctgtttccactaccgttaacggtatcggtgaacgtgctggtaacgctgctatcgaagaaatcgcgatggcgctgaaagttctgtacgaccacgacatgggtctgaacactgaaatcctgactgaaatctccaaactggttgaaaactactccaagatcaagatcccagaaaacaagccgctggttggtgaaatggtattctaccacgaatccggtatccacgttgacgcagtactggaaaacccgctgacttacgaaccgttcctgccggaaaagatcggtcagaaacgtaaaatcatcctgggtaaacactctggttgccgcgctgttgctcaccgtctgcaggaactgggtctggaagcatctcgcgacgaactgtgggaaatcgttaagaaaaccaaagaaactcgtgaggacggtactgaaatctctgacgaagtattcaaaaacatcgctgagaagatcatcaag

SEQ ID NO: 282 - protein, 386 aa, Methanococcus maripaludis S2; identical to SEQ ID NO: 6

SEQ ID NO: 283 - DNA, 1161 bp, Methanococcus maripaludis S2
atggactggaaagctgtatctccgtacaacccaaaattagatttaaaagactgttatttgtatgatacaacattgagagatggtgaacagacccctggagtttgttttgcaggagaccaaaaacttgaaattgctaagaaactggatgaacttaaaattaaacagattgaagcaggttttccaattgtttctgaaaatgaaagaaaagccatcaaatcaattactggagaaggcttaaatgcgcagattttagcattatcaagagttttaaaagaagatattgataaagccatcgaatgtgacgttgacgggataattacatttattgcaacttctccaatgcatttgaaatataaattacataagaatcttgatgaagtagaagaaatgggtatgaaagccgtagaatatgcaaaagatcacggcctttttgtagcattctccgcagaagatgcaacgagaacccctcttgaagacataattagaattcataaaaatgcagaagaacacggcgctgatagggtccatattgcagatactcttggatgtgcaacaccacaggcaatgtatcatatatgttctgaactaagcaaacacctgaaaaaagcacatattggagtacactgccacaatgactttggatttgcagttataaactcaatatacggtttaatcggtggtgcaaaagctgtatctaccacagttaatggtataggtgaaagagcaggaaatgctgcaattgaagaaattgcaatggccttaaaagtactttacgaccacgatatgggattaaatactgaaatactaactgaaatatctaaactcgttgaaaactattcaaaaatcaaaattcctgaaaataaaccgcttgttggagaaatggtattctaccatgaaagcggaatacacgtcgatgccgttttagaaaacccattaacatatgaaccatttttgcccgaaaaaatcggtcagaaaagaaaaattatccttggaaaacattccggttgtagggctgtcgcacacagactacaggaactcggacttgaagcttcaagagacgaattatgggaaattgtaaagaaaactaaagaaactagagaagacggtactgaaataagcgacgaagtgtttaaaaacattgcagaaaaaatcataaaataa

SEQ ID NO: 284 - DNA, 29 bp, Artificial Sequence
  Primer pF113-F-Nsil
aaattatgcatacagcatggcctgcaacg

SEQ ID NO: 285 - DNA, 31 bp, Artificial Sequence; identical to SEQ ID NO: 160
  primer pF113-R-AgeI

SEQ ID NO: 286 - DNA, 32 bp, Artificial Sequence; identical to SEQ ID NO: 161
  primer pairs AT-Vfl_for_Ec

SEQ ID NO: 287 - DNA, 33 bp, Artificial Sequence; identical to SEQ ID NO: 166
  primer pairs AT-Vfl_rev_Ec

SEQ ID NO: 288 - DNA, 32 bp, Artificial Sequence; identical to SEQ ID NO: 161
  primer AT-Pa01_for_Ec

SEQ ID NO: 289 - DNA, 32 bp, Artificial Sequence
  primer AT-Pa01_rev_Ec
aaatttactagtacaagaaagctgggttcaag

SEQ ID NO: 290 - DNA, 33 bp, Artificial Sequence; identical to SEQ ID NO: 162
  primer Kdc_for_Ec

SEQ ID NO: 291 - DNA, 35 bp, Artificial Sequence; identical to SEQ ID NO: 163
  primer Kdc_rev_Ec

1. Method for preparing alpha-ketopimelic acid, comprising converting alpha-ketoglutaric acid into alpha-ketoadipic acid and converting alpha-ketoadipic acid into alpha-ketopimelic acid, wherein at least one of these conversions is carried out using a heterologous biocatalyst.

2. Method according to claim 1, wherein alpha-ketoglutaric acid is biocatalytically prepared from a carbon source, in particular from a carbohydrate.

3. Method according to claim 1, wherein the heterologous biocatalyst comprises a heterologous biocatalyst catalysing C₁-elongation of alpha-ketoglutaric acid into alpha-ketoadipic acid and/or C₁-elongation of alpha-ketoadipic acid into alpha-ketopimelic acid.

4. Method according to claim 3, wherein the heterologous biocatalyst comprises
a. an AksA enzyme having homo₍ₙ₎citrate activity or an homologue thereof;
b. at least one enzyme selected from the group of AksD enzymes having homoₙ-aconitase activity, AksE enzymes having homoₙ-aconitase activity, homologues of said AksD enzymes and homologues of said AksE enzymes; and
c. an AksF enzyme having homoₙ-isocitrate dehydrogenase or a homologue thereof.

5. Method according to claim 3, wherein the heterologous enzyme system originates from an organism selected from the group of methanogenic archae, preferably selected from the group of Methanococcus, Methanocaldococcus, Methanosarcina, Methanothermobacter, Methanosphaera, Methanopyrus and Methanobrevibacter.

6. Method according to claim 1, wherein the heterologous biocatalyst comprises an enzyme system catalysing the conversion of alpha-ketoglutaric acid into alpha-ketoadipic acid, wherein said enzyme system forms part of the amino adipate pathway for lysine biosynthesis.

7. Method according to claim 6, wherein the enzyme system is from an organism selected from the group of yeasts, fungi, archaea and bacteria, in particular from the group of Penicillium, Cephalosporium, Paelicomyces, Trichophytum, Aspergillus, Phanerochaete, Emericella, Ustilago, Schizosaccharomyces, Saccharomyces, Candida, Yarrowia, Pichia, Kluyveromyces, Thermus, Deinococcus, Pyrococcus, Sulfolobus, Thermococcus, Methanococcus, Methanocaldococcus, Methanosphaera, Methanopyrus, Methanobrevibacter, Methanosarcina and Methanothermobacter.

8. Method according to claim 1, wherein the heterologous biocatalyst comprises an enzyme system catalysing the conversion of alpha-ketoglutaric acid into alpha-ketoadipic acid, wherein at least one of the enzymes of the enzyme system originates from nitrogen fixing bacteria selected from the group of cyanobacteria, rhizobiales, γ-proteobacteria and actinobacteria, in particular from the group of Anabaena, Microcystis, Synechocystis, Rhizobium, Bradyrhizobium, Pseudomonas, Azotobacter, Klebsiella and Frankia.

9. Method for preparing 5-formylpentanoic acid, comprising biocatalytically decarboxylating alpha-ketopimelic acid prepared in a method according to claim 1, thereby forming 5-formylpentanoic acid.

10. Method for preparing 6-aminocaproic acid, comprising converting 5-formylpentanoic acid, prepared in a method according to claim 9, into 6-aminocaproic acid.

11. Method according to claim 10 wherein the conversion of 5-formylpentanoic acid into 6-aminocaproic acid comprises transamination or reductive amination.

12. Method for preparing 6-aminocaproic acid, comprising converting alpha-ketopimelic acid prepared in a method according to claim 1 into alpha-aminopimelic acid and converting alpha-aminopimelic acid into 6-aminocaproic acid, which conversions are preferably carried out biocatalytically.

13. Method for preparing alpha-ketosuberic acid from alpha-ketopimelic acid prepared in a method according to claim 1 comprising subjecting the alpha-ketopimelic acid to C₁-elongation, using a biocatalyst having catalytic activity with respect to said C₁-elongation, in particular a biocatalyst comprising
d. an AksA enzyme having homo₍ₙ₎citrate activity or an homologue thereof;
e. at least one enzyme selected from the group of AksD enzymes having homoₙ-aconitase activity, AksE enzymes having homoₙ-aconitase activity, homologues of said AksD enzymes and homologues of said AksE enzymes; and
f. an AksF enzyme having homoₙ-isocitrate dehydrogenase or a homologue thereof.

14. Method according to claim 13, wherein the enzymes each indecently originate from an organism selected from the group of methanogenic archae, preferably selected from the group of Methanococcus, Methanocaldococcus, Methanosarcina, Methanothermobacter, Methanosphaera, Methanopyrus and Methanobrevibacter.

15. Method for preparing 7-aminoheptanoic acid comprising converting alpha-ketosuberic acid prepared in a method according to claim 13.

16. Method according to claim 1, wherein the method is carried out under fermentative conditions.

17. Heterologous cell, comprising one or more heterologous nucleic acid sequences encoding one or more heterologous enzymes having catalytic activity in at least one reaction step in the preparation of alpha ketopimelic acid from alpha-ketoglutaric acid.

18. Heterologous cell according to claim 17, wherein the cell is free of aminotransferases capable of catalysing the conversion of alpha-ketoadipate into alpha-aminoadipate.

19. Heterologous cell according to claim 17, comprising at least one nucleic acid sequence encoding an enzyme represented by any of the sequence ID's 4-77 261, 264, 267, 270, 273, 276, 279, 282, 186, 189, 192, 195, 225, 228, 231, 234, 198, 201, 204, 207, 237, 240, 243, 246, 210, 213, 216, 219, 222, 249, 252, 255, 258 or a homologue thereof.

20. Heterologous cell according to claim 17, comprising a nucleic acid sequence encoding an enzyme having catalytic activity with respect to the decarboxylation of alpha-ketopimelic acid to form 5-formylpentanoic acid, in particular such an enzyme selected from the group of decarboxylases (E.C. 4.1.1), more in particular from the group of glutamate decarboxylases (EC 4.1.1.15), diaminopimelate decarboxylases (EC 4.1.1.20) aspartate 1-decarboxylases (EC 4.1.1.11), branched chain alpha-keto acid decarboxylases, alpha-ketoisovalerate decarboxylases, alpha-ketoglutarate decarboxylases, pyruvate decarboxylases (EC 4.1.1.1), and oxaloacetate decarboxylases (E.C. 4.1.1.3).

21. Heterologous cell according to claim 17, wherein the cell is from an organism selected from the group of Penicillium chrysogenum, Aspergillus niger, Ustilago maydis, Saccharomyces cerevisiae, Kluyveromyces lactis, Pichia pastoris, Hansenula polymorha, Escherichia coil, Azotobacter vinelandii, Pseudomonas stutzerii, Klebsiella pneumoniae, Deinococcus radiourans, Deinococcus geothermalis, Thermus thermophllus, Methanococcus maripaludis, Methanosarcina acetivorans, Methanospirillum hungatei, Methanosaeta thermophile Methanobrevibacter smithii, Methanococcus vannielii, Methanococcus aeolicus and Methanocaldococcus jannashii.

22. Heterologous cell according to claim 17, comprising at least one nucleic acid sequence represented by any of the sequences selected from the group of SEQ ID NO 149; SEQ ID NO's 145, 146, 147, 148; SEQ ID NO's 167, 168, 169, 170, 171, 172, 173, 174; SEQ ID NO's 177, 178, 179, 180, 181, 182, 183, 184; SEQ ID NO's 224, 226, 236, 238, 248, 250, 260, 262; SEQ ID NO's 227, 229, 239, 241, 251, 253, 263, 265; SEQ ID NO's; 194, 196, 206, 208, 221, 223, 281, 283; SEQ ID NO's; 188, 190, 200, 202, 215, 217, 272, 274 and functional analogues thereof.

23. Use of a heterologous cell according to claim 17 in the preparation of caprolactam, 6-aminocaproic acid or diaminohexane.
